(19) United States
(12) Patent Application Publication
(10) Pub. No.: US 2015/0150158 A1
(43) Pub. Date: May 28, 2015

(54) PLANTS HAVING ENHANCED YIELD-RELATED TRAITS AND METHOD FOR MAKING THE SAME

(71) Applicants: BASF Plant Science Company GmbH, Ludwigshafen (DE); Crop Functional Genomic Center, Seoul (KR)

(72) Inventors: Christophe Reuzeau, La Chapelle Gonaguet (FR); Yang Do Choi, Seoul (KR); Ju Kon Kim, Sungnam (KR); Jin Seo Jeong, Seoul (KR)

(73) Assignees: BASF Plant Science Company GmbH, Ludwigshafen (DE); Crop Functional Genomic Center, Seoul (KR)

(21) Appl. No.: 14/353,162

(22) PCT Filed: Oct. 19, 2012
(86) PCT No.: PCT/IB2012/055733

§ 371 Date: Apr. 21, 2014

Related U.S. Application Data
(60) Provisional application No. 61/549,803, filed on Oct. 21, 2011.

(30) Foreign Application Priority Data
Oct. 21, 2011 (EP) 11186254.6

(51) Int. Cl. C12N 15/82

(52) U.S. Cl. CPC C12N 15/8261
USPC 800/287; 800/290; 800/298; 435/419; 435/320.1; 800/320.1; 800/320.3; 800/320; 435/412

(57) ABSTRACT

A method for enhancing yield-related traits in plants by modulating expression in a plant of a nucleic acid up-regulated upon overexpression of a NAC1 or NAC5-encoding gene, referred to herein as a NUG or NAC up-regulated gene, is provided. Plants having modulated expression of a NUG, which plants have enhanced yield-related traits relative to corresponding wild type plants or other control plants, are also provided. A method for conferring abiotic stress tolerance in plants, comprising modulating expression of a nucleic acid encoding a NAC1 or NAC5 polypeptide in plants grown under abiotic stress conditions, is also provided. Plants expressing a nucleic acid encoding a NAC1 or NAC5 polypeptide, aside from having increased abiotic stress tolerance, have enhanced yield-related traits and/or modified root architecture compared to corresponding wild type plants. Constructs useful in the methods and plants produced by the methods are also provided.

### BACKGROUND

[0001] The present invention relates generally to the field of molecular biology and concerns a method for enhancing yield-related traits in plants by modulating expression in a plant of a nucleic acid up-regulated upon overexpression of a NAC1 or NAC5-encoding gene, referred to herein as a NUG or “NAC up-regulated gene”. The present invention also concerns plants having modulated expression of a NUG, which plants have enhanced yield-related traits relative to corresponding wild type plants or other control plants. The present invention also relates to a method for conferring abiotic stress tolerance in plants, comprising modulating expression of a nucleic acid encoding a NAC1 or NAC5 polypeptide in plants grown under abiotic stress conditions. Plants expressing a nucleic acid encoding a NAC1 or NAC5 polypeptide, aside from having increased abiotic stress tolerance, have enhanced yield-related traits and/or modified root architecture compared to corresponding wild type plants. The invention also provides constructs useful in the methods of the invention and plants produced by the methods of the invention.

[0002] The ever-increasing world population and the dwindling supply of arable land available for agriculture fuels research towards increasing the efficiency of agriculture. Conventional means for crop and horticultural improvements utilise selective breeding techniques to identify plants having desirable characteristics. However, such selective breeding techniques have several drawbacks, namely that these techniques are typically labour intensive and result in plants that often contain heterogeneous genetic components that may not always result in the desirable trait being passed on from parent plants. Advances in molecular biology have allowed mankind to modify the germplasm of animals and plants. Genetic engineering of plants entails the isolation and manipulation of genetic material (typically in the form of DNA or RNA) and the subsequent introduction of that genetic material into a plant. Such technology has the capacity to deliver crops or plants having various improved economic, agronomic or horticultural traits.

[0003] A trait of particular economic interest is increased yield. Yield is normally defined as the measurable produce of economic value from a crop. This may be defined in terms of quantity and/or quality. Yield is directly dependent on several factors, for example, the number and size of the organs, plant architecture (for example, the number of branches), seed production, leaf senescence and more. Root development, nutrient uptake, stress tolerance and early vigour may also be important factors in determining yield. Optimizing the abovementioned factors may therefore contribute to increasing crop yield.

[0004] Seed yield is a particularly important trait, since the seeds of many plants are important for human and animal nutrition. Crops such as corn, rice, wheat, canola and soybean account for over half the total human caloric intake, whether through direct consumption of the seeds themselves or through consumption of meat products raised on processed seeds.

[0005] They are also a source of sugars, oils and many kinds of metabolites used in industrial processes. Seeds contain an embryo (the source of new shoots and roots) and an endosperm (the source of nutrients for embryo growth during germination and during early growth of seedlings). The development of a seed involves many genes, and requires the transfer of metabolites from the roots, leaves and stems into the growing seed. The endosperm, in particular, assimilates the metabolic precursors of carbohydrates, oils and proteins and synthesizes them into storage macromolecules to fill out the grain.

[0006] Another important trait for many crops is early vigour. Improving early vigour is an important objective of modern rice breeding programs in both temperate and tropical rice cultivars. Long roots are important for proper soil anchorage in water-seeded rice. Where rice is sown directly into flooded fields, and where plants must emerge rapidly through water, longer shoots are associated with vigour. Where drill-seeding is practiced, longer mesocotyls and coleoptiles are important for good seedling emergence. The ability to engineer early vigour into plants would be of great importance in agriculture. For example, poor early vigour has been a limitation to the introduction of maize (Zea mays L.) hybrids based on Corn Belt germplasm in the European Atlantic.

[0007] A further important trait is that of improved abiotic stress tolerance. Abiotic stress is a primary cause of crop loss worldwide, reducing average yields for most major crop plants by more than 50% (Wang et al., Planta 218, 1-14, 2003). Abiotic stresses may be caused by drought, salinity, extremes of temperature, chemical toxicity and oxidative stress. The ability to improve plant tolerance to abiotic stress would be of great economic advantage to farmers worldwide and would allow for the cultivation of crops during adverse conditions and in territories where cultivation of crops may not otherwise be possible.

[0008] Crop yield may therefore be increased by optimising one of the above-mentioned factors. Depending on the end use, the modification of certain yield traits may be favoured over others. For example for applications such as forage or wood production, or bio-fuel resource, an increase in the vegetative parts of a plant may be desirable, and for applications such as flour, starch or oil production, an increase in seed parameters may be particularly desirable. Even amongst the seed parameters, some may be favoured over others, depending on the application. Various mechanisms may contribute to increasing seed yield, whether that is in the form of increased seed size or increased seed number.

[0009] Among the widely studied drought-responsive genes are the transcriptional regulators belonging to NAC (NAM, ATAF, and CUC) gene-family. Members of the NAC gene-family are found only in plants and many are involved in stress responses. NAC proteins consist of a highly conserved N-terminal end, the DNA binding domain that can form a β-sheet structure where proteins form into either a homodimer or a heterodimer (Ernst et al., 2004; Hegedus et al., 2003; Jeong et al. 2009; Takasaki et al., 2010; Xie et al., 2000), and a highly variable C-terminal region (Zheng et al 2009).

[0010] WO 2007/144190 describes the use of various NAC-encoding nucleotide sequences for increasing yield in plants under non-stress conditions or under mild drought conditions.

[0011] It has now been found that various yield-related traits may be enhanced in plants by modulating expression in a plant of a nucleic acid up-regulated upon overexpression of a NAC1 or NAC5 gene/nucleic acid. Nucleic acids up-regulated upon overexpression of a NAC1 or NAC5 gene/nucleic acid are referred to herein as NUGs or NAC up-regulated genes.

[0012] It has also been found that overexpressing a nucleic acid encoding a NAC1 or NAC5 polypeptide in plants grown under abiotic stress conditions gives plants having enhanced yield-related traits and/or modified root architecture compared to corresponding wild type plants, wherein said nucleic acid is operably linked to a tissue-specific promoter.

[0013] It has also now been found that abiotic stress tolerance may be conferred in plants by overexpressing a nucleic acid encoding a NAC1 or NAC5 polypeptide in a plant, which nucleic acid is operably linked to a tissue-specific promoter.

### DETAILED DESCRIPTION OF THE INVENTION

[0014] The present invention shows that modulating expression in a plant of nucleic acid up-regulated upon overexpression of a NAC1 or NAC5 gene/nucleic acid, referred to herein as a NUG or NAC up-regulated gene, gives plants having enhanced yield-related traits relative to control plants.

[0015] The present invention also shows that overexpressing a nucleic acid encoding a NAC1 or NAC5 polypeptide in plants grown under abiotic stress conditions gives plants having enhanced yield-related traits and/or modified root architecture relative to corresponding wild type plants, wherein said nucleic acid is operably linked to a tissue-specific promoter.

### 1. NUG or NAC Up-Regulated Genes

[0016] According to a first aspect of the present invention, there is provided a method for enhancing yield-related traits in plants relative to control plants, comprising modulating expression in a plant of a NUG and optionally selecting for plants having enhanced yield-related traits.

[0017] According to further aspect of the present invention, there is provided a method for producing plants having enhanced yield-related traits relative to control plants, comprising the steps of modulating expression in a plant of a nucleic acid encoding a NUG polypeptide as described herein and optionally selecting for plants having enhanced yield-related traits.

[0018] A preferred method for modulating, preferably increasing, expression of a nucleic acid encoding a NUG polypeptide is by introducing and expressing in a plant a nucleic acid encoding a NUG polypeptide.

[0019] Any reference hereinafter to a “protein useful in the methods of the invention” is taken to mean a NUG polypeptide as defined herein. Any reference hereinafter to a “nucleic acid useful in the methods of the invention” is taken to mean a nucleic acid capable of encoding a NUG polypeptide. The nucleic acid to be introduced into a plant (and therefore useful in performing the methods of the invention) is any nucleic acid encoding the type of protein which will now be described, hereinafter also named “NUG nucleic acid” or “NUG gene”.

[0020] A “NUG polypeptide” as defined herein refers to any of the polypeptides described in Table A or Table B or a homologue of any of the polypeptides described in Table A or Table B.

[0021] An “NUG” or “NUG nucleic acid” as defined herein refers to any gene/nucleic acid capable of encoding a NUG polypeptide or homologue thereof as defined herein.

[0022] Examples of nucleic acids encoding NUG polypeptides are given in Table A and Table B herein; such nucleic acids are useful in performing the methods of the invention. Homologues of NUG polypeptides are also useful in performing the methods of the invention.

[0023] Table A shows up-regulated root-expressed genes in RCc3:OsNAC1 and GOS2:OsNAC1 plants in comparison to non-transgenic controls.

[0024] Table B shows up-regulated genes in RCc3:OsNAC5 and/or GOS2:OsNAC5 plants in comparison to non-transgenic controls.

[0025] Particularly preferred NUGs for use in the methods of the invention include the following:
[0026] a) O-methyltransferases, particularly Os09g0344500, OS10g0118000, OS10g0118200.
[0027] b) AAA-type ATPase, particularly OS09g0445700.
[0028] c) Leucine rich repeate, particularly OS08g0202300.
[0029] d) DNA binding/homeodomain, particularly OS11g0282700.
[0030] e) Oxidoreductase, 20G-Fe(II)oxygenase, OS04g0581100.
[0031] f) Calcium transporting ATPase, particularly OS10g0418100.
[0032] g) 9-cis epoxycaretenoid dioxygenase, particularly OS07g0154100.
[0033] h) cinnamoyl CoA Reductase 1, particularly OS02g0811800.
[0034] i) LLR kinase, particularly OS07g0251800.
[0035] j) WRKY40, particularly OS09g0417600.
[0036] k) Germin-like GLP oxidoreductase, particularly OS03g0694000.
[0037] l) C4 dicarboxylate transporter, particularly OS04g0574700.
[0038] m) Fructose bisphosphase aldolase, particularly OS08g0120600.
[0039] n) MnT, particularly OS10g0118200.
[0040] o) Oxo phytodienoic acid reductase, particularly OS06g0215900.
[0041] p) Cytochrome p450, particularly OS12g0150200.

[0042] The NUG polypeptide or homologue thereof is defined herein as having at least 25%, 26%, 27%, 28%, 29%, 30%, 31%, 32%, 33%, 34%, 35%, 36%, 37%, 38%, 39%, 40%, 41%, 42%, 43%, 44%, 45%, 46%, 47%, 48%, 49%, 50%, 51%, 52%, 53%, 54%, 55%, 56%, 57%, 58%, 59%, 60%, 81%, 62%, 63%, 64%, 65%, 66%, 67%, 68%, 69%, 70%, 71%, 72%, 73%, 74%, 75%, 76%, 77%, 78%, 79%, 80%, 81%, 82%, 83%, 84%, 85%, 86%, 87%, 88%, 89%, 90%, 91%, 92%, 93%, 94%, 95%, 96%_{,} 97%, 98%, 99% or 100% overall sequence identity to one or more of the polypeptide sequences given in Table A or Table B.

[0043] Also included within the term “homologue” are orthologues and paralogues of the NUG polypeptides given in Tables A and B, the terms “orthologues” and “paralogues” being as defined herein. Orthologues and paralogues may readily be identified by performing a so-called reciprocal blast search as described in the definitions section.

[0044] The overall sequence identity may be determined using a global alignment algorithm, such as the Needleman Wunsch algorithm in the program GAP (GCG Wisconsin Package, Accelrys), preferably with default parameters and preferably with sequences of mature proteins (i.e. without taking into account secretion signals or transit peptides). In one embodiment the sequence identity level is determined by comparison of the polypeptide sequences over the entire length of the polypeptide sequences in Table A and Table B.

[0045] The sequence identity level may also be determined by comparison of one or more conserved domains or motifs present in one of the polypeptide sequences in Table A or Table B compared to corresponding conserved domains or motifs in homologous family members of the NUG in question. Compared to overall sequence identity, the sequence identity will generally be higher when only conserved domains or motifs are considered. The terms “domain”, “signature” and “motif” are defined in the “definitions” section herein.

[0046] Tools for identifying domains are known in the art and comprise querying databases like InterPro (Hunter et al., Nucleic Acids Res. 37 (Database Issue):D224-228, 2009) with a protein sequence from Table A or B, or of homologous sequences therefrom. Also the identification of motifs is known in the art, for example by using the MEME algorithm (Bailey and Elkan, Proceedings of the Second International Conference on Intelligent Systems for Molecular Biology, pp. 28-36, AAAI Press, Menlo Park, Calif., 1994). To this end, a set of homologous protein sequences is used as input. At each position within a MEME motif, the residues are shown that are present in the query set of sequences with a frequency higher than 0.2. Residues within square brackets represent alternatives.

[0047] The nucleic acid sequences encoding NUG polypeptides confer information for synthesis of the NUG that increases yield or yield related traits as described herein, when such a nucleic acid sequence of the invention is transcribed and translated in a living plant cell.

[0048] Nucleic acid variants may also be useful in practising the methods of the invention. Examples of such variants include nucleic acids encoding homologues and derivatives of any one of the amino acid sequences given in Table A or Table B herein, the terms “homologue” and “derivative” being as defined herein.

[0049] Also useful in the methods of the invention are nucleic acids encoding homologues and derivatives of orthologues or paralogues of any one of the amino acid sequences given in Table A or Table B herein. Homologues and derivatives useful in the methods of the present invention have substantially the same biological and functional activity as the unmodified protein from which they are derived. Further variants useful in practising the methods of the invention are variants in which codon usage is optimised or in which miRNA target sites are removed.

[0050] Further nucleic acid variants useful in practising the methods of the invention include portions of nucleic acids encoding NUG polypeptides, nucleic acids hybridising to nucleic acids encoding NUG polypeptides, splice variants of nucleic acids encoding NUG polypeptides, allelic variants of nucleic acids encoding NUG polypeptides and variants of nucleic acids encoding NUG polypeptides obtained by gene shuffling. The terms hybridising sequence, splice variant, allelic variant and gene shuffling are as described herein.

[0051] Nucleic acids encoding NUG polypeptides need not be full-length nucleic acids, since performance of the methods of the invention does not rely on the use of full-length nucleic acid sequences. According to the present invention, there is provided a method for enhancing yield-related traits in plants, comprising introducing and expressing in a plant a portion of any one of the nucleic acid sequences given in Table A or Table B herein, or a portion of a nucleic acid encoding an orthologue, paralogue or homologue of any of the amino acid sequences given in Table A or Table B herein.

[0052] A portion of a nucleic acid may be prepared, for example, by making one or more deletions to the nucleic acid. The portions may be used in isolated form or they may be fused to other coding (or non-coding) sequences in order to, for example, produce a protein that combines several activities. When fused to other coding sequences, the resultant polypeptide produced upon translation may be bigger than that predicted for the protein portion.

[0053] Portions useful in the methods of the invention, encode a NUG polypeptide as defined herein or at least part thereof, and have substantially the same biological activity as the amino acid sequences given in Table A or Table B herein. Preferably, the portion is a portion of any one of the nucleic acids given in Table A or Table B herein, or is a portion of a nucleic acid encoding an orthologue or paralogue of any one of the amino acid sequences given in Table A or Table B. Preferably the portion is at least 500, 550, 600, 650, 700, 750, 800, 850, 900, 950, 1000 consecutive nucleotides in length, the consecutive nucleotides being of any one of the nucleic acid sequences given in Table A or Table B, or of a nucleic acid encoding an orthologue or paralogue of any one of the amino acid sequences given in Table A or Table B herein.

[0054] Another nucleic acid variant useful in the methods of the invention is a nucleic acid capable of hybridising, under reduced stringency conditions, preferably under stringent conditions, with a nucleic acid encoding a NUG polypeptide as defined herein, or with a portion as defined herein. According to the present invention, there is provided a method for enhancing yield-related traits in plants, comprising introducing and expressing in a plant a nucleic acid capable of hybridizing to a nucleic acid encoding any one of the proteins given in Table A or Table B, or to a nucleic acid encoding an orthologue, paralogue or homologue of any of the proteins given in Table A or Table B.

[0055] Hybridising sequences useful in the methods of the invention encode a NUG polypeptide as defined herein having substantially the same biological activity as the amino acid sequence given in Table A or Table B encoded by the nucleic acid to which the hybridising sequence hybridises. Preferably, the hybridising sequence is capable of hybridising to the complement of a nucleic acid encoding any one of the proteins given in Table A or Table B, or to a portion of any of these sequences, a portion being as defined herein, or the hybridising sequence is capable of hybridising to the complement of a nucleic acid encoding an orthologue or paralogue of any one of the amino acid sequences given in Table A or Table B. The hybridization conditions may be medium stringency conditions or high stringency conditions, as defined herein.

[0056] Preferably, the hybridising sequence encodes a polypeptide with an amino acid sequence which comprises at least some of the motifs or conserved regions present in the polypeptide sequence encoded by the nucleic acid to which the hybridising sequence hybridises and/or has the same biological activity as the polypeptide encoded by the nucleic acid to which the hybridising sequence hybridises and/or has at least 50%, 55%, 60%, 65%, 70%, 75%, 80%, 85%, 90% or 95% or more sequence identity to the polypeptide encoded by the nucleic acid to which the hybridising sequence hybridises.

[0057] In another embodiment, there is provided a method for enhancing yield-related traits in plants, comprising introducing and expressing in a plant a splice variant or an allelic variant of a nucleic acid encoding any one of the proteins given in Table A or Table B herein, or a splice variant or an allelic variant of a nucleic acid encoding an orthologue, paralogue or homologue of any of the amino acid sequences given in Table A or Table B.

[0058] Preferred splice variants or allelic variants are those where the amino acid sequence encoded by the splice variant or allelic variant comprises at least some of the motifs or other conserved regions found in the non-variant sequence and/or has the same biological activity as the non-variant sequence and/or has at least 50%, 55%, 60%, 65%, 70%, 75%, 80%, 85%, 90% or 95% or more sequence identity to the non-variant sequence. Allelic variants exist in nature, and encompassed within the methods of the present invention is the use of these natural alleles.

[0059] According to a further embodiment of the present invention, there is provided a method for enhancing yield-related traits in plants, comprising introducing and expressing in a plant a variant of any one of the nucleic acid sequences given in Table A or Table B, or comprising introducing and expressing in a plant a variant of a nucleic acid encoding an orthologue, paralogue or homologue of any of the amino acid sequences given in Table A or Table B, which variant nucleic acid is obtained by gene shuffling.

[0060] Preferably, the amino acid sequence encoded by the variant nucleic acid obtained by gene shuffling comprises at least some motifs or other conserved regions found in the non-variant sequence and/or has the same biological activity as the non-variant sequence and/or has at least 50%, 55%, 60%, 65%, 70%, 75%, 80%, 85%, 90% or 95% or more sequence identity to the non-variant sequence from which the variant is derived.

[0061] Furthermore, nucleic acid variants may also be obtained by site-directed mutagenesis. Several methods are available to achieve site-directed mutagenesis, the most common being PCR based methods (Current Protocols in Molecular Biology. Wiley Eds). NUG polypeptides differing from the sequences of Table A or Table B by one or several amino acids (substitution(s), insertion(s) and/or deletion(s) as defined herein) may equally be useful to increase the yield of plants in the methods and constructs and plants of the invention.

[0062] Nucleic acids encoding NUG polypeptides may be derived from any natural or artificial source. The nucleic acid may be modified from its native form in composition and/or genomic environment through deliberate human manipulation.

[0063] Preferably the NUG polypeptide-encoding nucleic acid is from a plant, further preferably from a monocotyledonous plant, more preferably from the family Poaceae, most preferably the nucleic acid is from Oryza sativa.

[0064] The present invention also extends to the use of recombinant chromosomal DNA comprising a nucleic acid sequence useful in the methods of the invention, wherein said nucleic acid is present in the chromosomal DNA as a result of recombinant methods, but is not in its natural genetic environment. In a further embodiment the recombinant chromosomal DNA of the invention is comprised in a plant cell.

[0065] Performance of the methods of the invention gives plants having enhanced yield-related traits. In a particular embodiment of the invention, performance of the methods of the invention gives plants having increased early vigour and/or increased yield and/or increased biomass and/or increased seed yield relative to control plants. The terms “early vigour”, “biomass”, “yield” and “seed yield” are described in more detail in the “definitions” section herein.

[0066] The present invention therefore provides a method for enhancing yield-related traits relative to control plants, comprising modulating expression in a plant of a nucleic acid encoding a NUG polypeptide as defined herein.

[0067] According to a further embodiment of the present invention, performance of the methods of the invention gives plants having increased growth rate relative to control plants. Therefore, according to the present invention, there is provided a method for increasing the growth rate of plants, which method comprises modulating expression in a plant of a nucleic acid encoding a NUG polypeptide as defined herein.

[0068] Performance of the methods of the invention gives plants grown under non-stress conditions or under mild drought conditions enhanced yield-related traits relative to control plants grown under comparable conditions. Therefore, according to the present invention, there is provided a method for enhancing yield-related traits in plants grown under non-stress conditions or under mild drought conditions, which method comprises modulating expression in a plant of a nucleic acid encoding a NUG polypeptide.

[0069] Performance of the methods of the invention gives plants grown under conditions of drought, enhanced yield-related traits relative to control plants grown under comparable conditions. Therefore, according to the present invention, there is provided a method for enhancing yield-related traits in plants grown under conditions of drought which method comprises modulating expression in a plant of a nucleic acid encoding a NUG polypeptide.

[0070] Performance of the methods of the invention gives plants grown under conditions of nutrient deficiency, particularly under conditions of nitrogen deficiency, enhanced yield-related traits relative to control plants grown under comparable conditions. Therefore, according to the present invention, there is provided a method for enhancing yield-related traits in plants grown under conditions of nutrient deficiency, which method comprises modulating expression in a plant of a nucleic acid encoding a NUG polypeptide.

[0071] Performance of the methods of the invention gives plants grown under conditions of salt stress, enhanced yield-related traits relative to control plants grown under comparable conditions. Therefore, according to the present invention, there is provided a method for enhancing yield-related traits in plants grown under conditions of salt stress, which method comprises modulating expression in a plant of a nucleic acid encoding a NUG polypeptide.

[0072] The invention also provides genetic constructs and vectors to facilitate introduction and/or expression in plants of nucleic acids encoding NUG polypeptides. The gene constructs may be inserted into vectors, which may be commercially available, suitable for transforming into plants or host cells and suitable for expression of the gene of interest in the transformed cells. The invention also provides use of a gene construct as defined herein in the methods of the invention.

[0073] More specifically, the present invention provides a construct comprising:
[0074] (a) a nucleic acid encoding a NUG polypeptide as defined above;
[0075] (b) one or more control sequences capable of driving expression of the nucleic acid sequence of (a); and optionally
[0076] (c) a transcription termination sequence.

[0077] Preferably, the nucleic acid encoding a NUG polypeptide is as defined above. The term “control sequence” and “termination sequence” are as defined herein.

[0078] The genetic construct of the invention may be comprised in a host cell, plant cell, seed, agricultural product or plant. Plants or host cells are transformed with a genetic construct such as a vector or an expression cassette comprising any of the nucleic acids described above. Thus the invention further provides plants or host cells transformed with a construct as described above. In particular, the invention provides plants transformed with a construct as described above, which plants have increased yield-related traits as described herein.

[0079] In one embodiment the genetic construct of the invention confers increased yield or yield related traits(s) to a plant when it has been introduced into said plant, which plant expresses the nucleic acid encoding the NUG comprised in the genetic construct. In another embodiment the genetic construct of the invention confers increased yield or yield related traits(s) to a plant comprising plant cells in which the construct has been introduced, which plant cells express the nucleic acid encoding the NUG comprised in the genetic construct.

[0080] The skilled artisan is well aware of the genetic elements that must be present on the genetic construct in order to successfully transform, select and propagate host cells containing the sequence of interest. The sequence of interest is operably linked to one or more control sequences (at least to a promoter).

[0081] Advantageously, any type of promoter, whether natural or synthetic, may be used to drive expression of the nucleic acid sequence, but preferably the promoter is of plant origin. A constitutive promoter is particularly useful in the methods. See the “Definitions” section herein for definitions of the various promoter types.

[0082] The constitutive promoter is preferably a ubiquitous constitutive promoter of medium strength. More preferably it is a plant derived promoter, e.g. a promoter of plant chromosomal origin, such as a GOS2 promoter or a promoter of substantially the same strength and having substantially the same expression pattern (a functionally equivalent promoter), more preferably the promoter is the promoter GOS2 promoter from rice. See the “Definitions” section herein for further examples of constitutive promoters.

[0083] Optionally, one or more terminator sequences may be used in the construct introduced into a plant. Those skilled in the art will be aware of terminator sequences that may be suitable for use in performing the invention. Preferably, the construct comprises an expression cassette comprising a constitutive promoter (such as GOS2), operably linked to the nucleic acid encoding the NUG polypeptide. The construct may further comprises a terminator (such as a zein terminator) linked to the 3′ end of the NUG coding sequence. Furthermore, one or more sequences encoding selectable markers may be present on the construct introduced into a plant.

[0084] According to a preferred feature of the invention, the modulated expression is increased expression. Methods for increasing expression of nucleic acids or genes, or gene products, are well documented in the art and examples are provided in the definitions section.

[0085] As mentioned above, a preferred method for modulating expression of a nucleic acid encoding a NUG polypeptide is by introducing and expressing in a plant a nucleic acid encoding a NUG polypeptide; however the effects of performing the method, i.e. enhancing yield-related traits may also be achieved using other well-known techniques, including but not limited to T-DNA activation tagging, TILLING, homologous recombination. A description of these techniques is provided in the definitions section.

[0086] The invention also provides a method for the production of transgenic plants having enhanced yield-related traits relative to control plants, comprising introduction and expression in a plant of any nucleic acid encoding a NUG polypeptide as defined herein.

[0087] More specifically, the present invention provides a method for the production of transgenic plants having enhanced yield-related traits, comprising:
[0088] (i) introducing and expressing in a plant or plant cell a NUG polypeptide-encoding nucleic acid or a genetic construct comprising a NUG polypeptide-encoding nucleic acid; and
[0089] (ii) cultivating the plant cell under conditions promoting plant growth and development.

[0090] The nucleic acid of (i) may be any of the nucleic acids capable of encoding a NUG polypeptide as defined herein.

[0091] Cultivating the plant cell under conditions promoting plant growth and development, may or may not include regeneration and/or growth to maturity. Accordingly, in a particular embodiment of the invention, the plant cell transformed by the method according to the invention is regenerable into a transformed plant. In another particular embodiment, the plant cell transformed by the method according to the invention is not regenerable into a transformed plant, i.e. cells that are not capable to regenerate into a plant using cell culture techniques known in the art. While plants cells generally have the characteristic of totipotency, some plant cells cannot be used to regenerate or propagate intact plants from said cells. In one embodiment of the invention the plant cells of the invention are such cells. In another embodiment the plant cells of the invention are plant cells that do not sustain themselves in an autotrophic way.

[0092] The nucleic acid may be introduced directly into a plant cell or into the plant itself (including introduction into a tissue, organ or any other part of a plant). According to a preferred feature of the present invention, the nucleic acid is preferably introduced into a plant or plant cell by transformation. The term “transformation” is described in more detail in the “definitions” section herein.

[0093] In one embodiment the present invention extends to any plant cell or plant produced by any of the methods described herein, and to all plant parts and propagules thereof.

[0094] The present invention encompasses plants or parts thereof (including seeds) obtainable by the methods according to the present invention. The plants or plant parts or plant cells comprise a nucleic acid transgene encoding a NUG polypeptide as defined above, preferably in a genetic construct such as an expression cassette. The present invention extends further to encompass the progeny of a primary transformed or transfected cell, tissue, organ or whole plant that has been produced by any of the aforementioned methods, the only requirement being that progeny exhibit the same genotypic and/or phenotypic characteristic(s) as those produced by the parent in the methods according to the invention.

[0095] In a further embodiment the invention extends to seeds comprising the expression cassettes of the invention, the genetic constructs of the invention, or the nucleic acids encoding the NUG and/or the NUG polypeptides as described above.

[0096] The invention also includes host cells containing an isolated nucleic acid encoding a NUG polypeptide as defined above. In one embodiment host cells according to the invention are plant cells, yeasts, bacteria or fungi. Host plants for the nucleic acids, construct, expression cassette or the vector used in the method according to the invention are, in principle, advantageously all plants which are capable of synthesizing the polypeptides used in the inventive method. In a particular embodiment the plant cells of the invention overexpress the nucleic acid molecule of the invention.

[0097] The methods of the invention are advantageously applicable to any plant, in particular to any plant as defined herein. Plants that are particularly useful in the methods of the invention include all plants which belong to the superfamily Viridiplantae, in particular monocotyledonous and dicotyledonous plants including fodder or forage legumes, ornamental plants, food crops, trees or shrubs. According to an embodiment of the present invention, the plant is a crop plant. Examples of crop plants include but are not limited to chicory, carrot, cassava, trefoil, soybean, beet, sugar beet, sunflower, canola, alfalfa, rapeseed, linseed, cotton, tomato, potato and tobacco. According to another embodiment of the present invention, the plant is a monocotyledonous plant. Examples of monocotyledonous plants include sugarcane. According to another embodiment of the present invention, the plant is a cereal. Examples of cereals include rice, maize, wheat, barley, millet, rye, triticale, sorghum, emmer, spelt, einkorn, teff, milo and oats. In a particular embodiment the plants used in the methods of the invention are selected from the group consisting of maize, wheat, rice, soybean, cotton, oilseed rape including canola, sugarcane, sugar beet and alfalfa. Advantageously the methods of the invention are more efficient than the known methods, because the plants of the invention have increased yield and/or tolerance to an environmental stress compared to control plants used in comparable methods.

[0098] The invention also extends to harvestable parts of a plant such as, but not limited to seeds, leaves, fruits, flowers, stems, roots, rhizomes, tubers and bulbs, which harvestable parts comprise a recombinant nucleic acid encoding a NUG polypeptide. The invention furthermore relates to products derived or produced, preferably directly derived or produced, from a harvestable part of such a plant, such as dry pellets, meal or powders, oil, fat and fatty acids, starch or proteins.

[0099] The invention also includes methods for manufacturing a product comprising a) growing the plants of the invention and b) producing said product from or by the plants of the invention or parts thereof, including seeds. In a further embodiment the methods comprise the steps of a) growing the plants of the invention, b) removing the harvestable parts as described herein from the plants and c) producing said product from, or with the harvestable parts of plants according to the invention.

[0100] In one embodiment the products produced by the methods of the invention are plant products such as, but not limited to, a foodstuff, feedstuff, a food supplement, feed supplement, fiber, cosmetic or pharmaceutical. In another embodiment the methods for production are used to make agricultural products such as, but not limited to, plant extracts, proteins, amino acids, carbohydrates, fats, oils, polymers, vitamins, and the like.

[0101] In yet another embodiment, the polynucleotides or the polypeptides of the invention are comprised in an agricultural product. In a particular embodiment the nucleic acid sequences and protein sequences of the invention may be used as product markers, for example where an agricultural product was produced by the methods of the invention. Such a marker can be used to identify a product to have been produced by an advantageous process resulting not only in a greater efficiency of the process but also improved quality of the product due to increased quality of the plant material and harvestable parts used in the process. Such markers can be detected by a variety of methods known in the art, for example but not limited to PCR based methods for nucleic acid detection or antibody based methods for protein detection.

[0102] The present invention also encompasses use of nucleic acids encoding NUG polypeptides as described herein and use of these NUG polypeptides in enhancing any of the aforementioned yield-related traits in plants. For example, nucleic acids encoding NUG polypeptide described herein, or the NUG polypeptides themselves, may find use in breeding programmes in which a DNA marker is identified which may be genetically linked to a NUG polypeptide-encoding gene. The nucleic acids/genes, or the NUG polypeptides themselves may be used to define a molecular marker. This DNA or protein marker may then be used in breeding programmes to select plants having enhanced yield-related traits as defined herein in the methods of the invention. Furthermore, allelic variants of a NUG polypeptide-encoding nucleic acid/gene may find use in marker-assisted breeding programmes. Nucleic acids encoding NUG polypeptides may also be used as probes for genetically and physically mapping the genes that they are a part of, and as markers for traits linked to those genes. Such information may be useful in plant breeding in order to develop lines with desired phenotypes.

### 2. NAC1 and NAC5

[0103] According to a second aspect of the present invention, there is provided a method for enhancing yield-related traits in plants grown under abiotic stress conditions, comprising modulating expression in a plant of a nucleic acid encoding a NAC1 or NAC5 polypeptide.

[0104] In a particular embodiment, where plants are grown under abiotic stress conditions, expression of the NAC1 or NAC5-encoding nucleic acid is driven by a tissue-specific promoter, preferably by a root-specific promoter.

[0105] In a further embodiment, the enhanced yield-related traits comprise increased seed yield and/or modified root architecture.

[0106] According to a further aspect of the present invention, there is provided a method for producing plants having enhanced yield-related traits relative to control plants, comprising the steps of modulating expression in plants grown under abiotic stress of a nucleic acid encoding a NAC1 or NAC5 polypeptide and optionally selecting for plants having enhanced yield-related traits.

[0107] According to a further aspect of the present invention, there is provided a method for conferring abiotic stress tolerance in plants comprising modulating expression in a plant of a nucleic acid encoding a NAC1 or NAC5 polypeptide.

[0108] In the context of the invention concerning NAC1 and NAC5, any reference to a “protein useful in the methods of the invention” is taken to mean a NAC1 or NAC5 polypeptide as defined herein. Any reference hereinafter to a “nucleic acid useful in the methods of the invention” is taken to mean a nucleic acid capable of encoding a NAC1 or NAC5 polypeptide. The nucleic acid to be introduced into a plant (and therefore useful in performing the methods of the invention) is any nucleic acid encoding the type of protein which will now be described, hereinafter also named “NAC1 nucleic acid” or “NAC1 gene” or “NAC5 nucleic acid” or NAC5 gene”.

[0109] A “NAC1 polypeptide” or a “NAC5 polypeptide” as defined herein refers to any polypeptide comprising any one or more of the motifs described below.

[0110] A “NAC1 gene” or a “NAC5 gene” as defined herein refers to any nucleic acid encoding a NAC1 polypeptide or a NAC5 polypeptide as defined herein.

Motif I: KIDLDIIQELD, or a motif having in increasing order of preference at least 50%, 60%, 70%, 80% or 90% sequence identity to the sequence of Motif I.

[0111] Motif I is preferably K/P/R/G I/S/M D/A/E/Q L/I/V D I/V/F I Q/V/R/K E/D L/I/V D.

Motif II: CKYGXGHGGDEQTEW, or a motif having in increasing order of preference at least 50%, 60%, 70%, 80% or 90% sequence identity to the sequence of Motif II, where ‘X’ is taken to be any amino acid.

[0112] Motif II is preferably C K/R Y/L/I G XXX G/Y/N D/E E Q/R T/N/S EW, where ‘X’ is any amino acid.

Motif III: GWVVCRAFQKP, or a motif having in increasing order of preference at least 50%, 60%, 70%, 80% or 90% sequence identity to the sequence of Motif III.

[0113] Motif III is preferably GWVVCR A/V F X¹ K X², where ‘X¹’ and ‘X²’ may be any amino acid, preferably X¹ is Q/R/K, preferably X² is P/R/K.

Motif IV: PVPIIA, or a motif having in increasing order of preference at least 50%, 60%, 70%, 80% or 90% sequence identity to the sequence of Motif IV.

[0114] Motif IV is preferably A/P/S/N V/L/I/A P/S/D/V/Q V/I I A/T/G.

Motif V: NGSRPN, or a motif having in increasing order of preference at least 50%, 60%, 70%, 80% or 90% sequence identity to the sequence of Motif V.

[0115] Motif V is preferably N G/S S/Q/A/V RP N/S.

Motif VI: CRLYNKK, or a motif having in increasing order of preference at least 50%, 60%, 70%, 80% or 90% sequence identity to the sequence of Motif VI.

[0116] Motif VI is preferably C/Y R/K L/I Y/H/F N/K K K/N/C/S/T

Motif VII: NEWEKMQ, or a motif having in increasing order of preference at least 50%, 60%, 70%, 80% or 90% sequence identity to the sequence of Motif VII.

[0117] Motif VII is preferably N E/Q/T WEK M/V Q/R/K

Motif VIII: WGETRTPESE, or a motif having in increasing order of preference at least 50%, 60%, 70%, 80% or 90% sequence identity to the sequence Motif VIII.

[0118] Motif VIII is preferably WGE T/A RTPES E/D

Motif IX: VPKKESMDDA, or a motif having in increasing order of preference at least 50%, 60%, 70%, 80% or 90% sequence identity to the sequence of Motif IX.

[0119] Motif IX is preferably V/L PK K/E E S/R/A/V M/V/A/Q/R D/E D/E/L A/G/D

Motif X: SYDDIQGMYS, or a motif having in increasing order of preference at least 50%, 60%, 70%, 80% or 90% sequence identity to the sequence of Motif X.

[0120] Motif X is preferably S L/Y DD LII Q G/S L/M/P G/Y S/N.

Motif XI: DSMPRLHADSSCSE, or a motif having in increasing order of preference at least 50%, 60%, 70%, 80% or 90% sequence identity to the sequence of Motif XI.

[0121] Motif XI is preferably DS M/V/I P R/K L/I/A H T/A/S D/E SS C/G SE.

[0122] Each of motifs I to XI may comprise one or more conservative amino acid substitution at any position.

[0123] The NAC1 or NAC5 polypeptide may comprises at least 1 or at least 2 or at least 3 or at least 4 or at least 5 or at least 6 or at least 7 or at least 8 or at least 9 or at least 10 or at least 11 of the motifs defined above.

[0124] Further motifs present in NAC1 or NAC5 polypeptides may be identified using the MEME algorithm (Bailey and Elkan, Proceedings of the Second International Conference on Intelligent Systems for Molecular Biology, pp. 28-36, AAAI Press, Menlo Park, Calif., 1994) or using other methods or tools known in the art.

[0125] A preferred method for modulating (preferably, increasing) expression of a nucleic acid encoding a NAC1 or NAC5 polypeptide is by introducing and expressing in a plant a nucleic acid encoding a NAC1 or NAC5 polypeptide

[0126] According one aspect of the invention, there is provided a method for improving yield-related traits in plants and/or modifying root architecture relative to control plants, comprising modulating expression in a plant of a nucleic acid encoding a NAC1 or NAC5 polypeptide as defined herein.

[0127] Additionally or alternatively, the NAC1 or NAC5 polypeptide has in increasing order of preference at least 25%, 26%, 27%, 28%, 29%, 30%, 31%, 32%, 33%, 34%, 35%, 36%, 37%, 38%, 39%, 40%, 41%, 42%, 43%, 44%, 45%, 46%, 47%, 48%, 49%, 50%, 51%, 52%, 53%, 54%, 55%, 56%, 57%, 58%, 59%, 60%, 61%, 62%, 63%, 64%, 65%, 66%, 67%, 68%, 69%, 70%, 71%, 72%, 73%, 74%, 75%, 76%, 77%, 78%, 79%, 80%, 81%, 82%, 83%, 84%, 85%, 86%, 87%, 88%, 89%, 90%, 91%, 92%, 93%, 94%, 95%, 96%, 97%, 98%, or 99% overall sequence identity to the amino acid represented by SEQ ID NO: 2 or SEQ ID NO: 4, provided that the homologous protein comprises any one or more of the conserved motifs as outlined above. In a particular embodiment the NAC1 polypeptide is represented by SEQ ID NO: 2. In a particular embodiment the NAC5 polypeptide is represented by SEQ ID NO: 4.

[0128] The overall sequence identity may be determined using a global alignment algorithm, such as the Needleman Wunsch algorithm in the program GAP (GCG Wisconsin Package, Accelrys), preferably with default parameters and preferably with sequences of mature proteins (i.e. without taking into account secretion signals or transit peptides). In one embodiment the sequence identity level is determined by comparison of the polypeptide sequences over the entire length of the sequence of SEQ ID NO: 2 or SEQ ID NO: 4.

[0129] In another embodiment, the sequence identity level is determined by comparison of one or more conserved domains or motifs in SEQ ID NO: 2 or SEQ ID NO: 4 with corresponding conserved domains or motifs in other NAC1 and NAC5 polypeptides. Compared to overall sequence identity, the sequence identity will generally be higher when only conserved domains or motifs are considered. Preferably the motifs in a NAC1 or NAC5 polypeptide have, in increasing order of preference, at least 70%, 71%, 72%, 73%, 74%, 75%, 76%, 77%, 78%, 79%, 80%, 81%, 82%, 83%, 84%, 85%, 86%, 87%, 88%, 89%, 90%, 91%, 92%, 93%, 94%, 95%, 96%, 97%, 98%, or 99% sequence identity to any one or more of the motifs represented by SEQ ID NO: 5 to SEQ ID NO: 15 (Motifs I to XI). The terms “domain”, “signature” and “motif” are as defined in the “definitions” section herein.

[0130] Preferably, the polypeptide sequence which when used in the construction of a phylogenetic tree, such as the given in Ooka et al., 2003 (DNA Research 10, 239-247), clusters with other NAC1 and NAC5 family members rather than with any other NAC.

[0131] Nucleic acids encoding NAC1 and NAC5 polypeptides, when expressed in rice according to the methods of the present invention as outlined in the Examples section herein, give plants grown under abiotic stress conditions enhanced yield related traits, in particular increased seed yield and/or modified root architecture. Another function of the nucleic acid sequences encoding NAC1 and NAC5 polypeptides is to confer information for synthesis of the NAC1 and NAC5 that increases yield or yield related traits as described herein, when such a nucleic acid sequence of the invention is transcribed and translated in a living plant cell.

[0132] The present invention is illustrated by transforming plants with the nucleic acid sequence represented by SEQ ID NO: 1, encoding the polypeptide sequence of SEQ ID NO: 2 and by transforming plants with the nucleic acid sequence represented by SEQ ID NO: 3 encoding the polypeptide of SEQ ID NO: 4. However, performance of the invention is not restricted to these sequences; the methods of the invention may advantageously be performed using any NAC1-encoding or NAC5-encoding nucleic acid or NAC1 or NAC5 polypeptide as defined herein. The term “NAC1” or “NAC1 polypeptide” as used herein also includes homologues as defined hereunder of SEQ ID NO: 2. The term “NAC5” or “NAC5 polypeptide” as used herein also includes homologues as defined hereunder of SEQ ID NO: 4.

[0133] Examples of nucleic acids encoding NAC1 and NAC5 polypeptides are given in Table C herein. Such nucleic acids are useful in performing the methods of the invention. The amino acid sequences given in Table C of the Examples section are example sequences of orthologues and paralogues of the NAC1 and NAC5 polypeptide represented by SEQ ID NO: 2 and SEQ ID NO: 4 respectively, the terms “orthologues” and “paralogues” being as defined herein. Further orthologues and paralogues may readily be identified by performing a so-called reciprocal blast search as described in the definitions section; where the query sequence is SEQ ID NO: 1, SEQ ID NO: 2, SEQ ID NO: 3 or SEQ ID NO: 4, the second BLAST (back-BLAST) would be against rice sequences.

[0134] Nucleic acid variants may also be useful in practising the methods of the invention. Examples of such variants include nucleic acids encoding homologues and derivatives of any one of the amino acid sequences given in Table C herein, the terms “homologue” and “derivative” being as defined herein. Also useful in the methods of the invention are nucleic acids encoding homologues and derivatives of orthologues or paralogues of any one of the amino acid sequences given in Table C of the Examples section. Homologues and derivatives useful in the methods of the present invention have substantially the same biological and functional activity as the unmodified protein from which they are derived. Further variants useful in practising the methods of the invention are variants in which codon usage is optimised or in which miRNA target sites are removed.

[0135] Further nucleic acid variants useful in practising the methods of the invention include portions of nucleic acids encoding NAC1 and NAC5 polypeptides, nucleic acids hybridising to nucleic acids encoding NAC1 or NAC5 polypeptides, splice variants of nucleic acids encoding NAC1 or NAC5 polypeptides, allelic variants of nucleic acids encoding NAC1 or NAC5 polypeptides and variants of nucleic acids encoding NAC1 or NAC5 polypeptides obtained by gene shuffling. The terms hybridising sequence, splice variant, allelic variant and gene shuffling are as described herein.

[0136] Nucleic acids encoding NAC1 or NAC5 polypeptides need not be full-length nucleic acids, since performance of the methods of the invention does not rely on the use of full-length nucleic acid sequences. According to the present invention, there is provided a method for enhancing yield-related traits in plants grown under abiotic stress conditions, comprising introducing and expressing in a plant a portion of a nucleic acid encoding any one of the proteins given in Table C herein, or a portion of a nucleic acid encoding an orthologue, paralogue or homologue of any of the amino acid sequences given in Table C.

[0137] A portion of a nucleic acid may be prepared, for example, by making one or more deletions to the nucleic acid. The portions may be used in isolated form or they may be fused to other coding (or non-coding) sequences in order to, for example, produce a protein that combines several activities. When fused to other coding sequences, the resultant polypeptide produced upon translation may be bigger than that predicted for the protein portion.

[0138] Portions useful in the methods of the invention, encode a NAC1 or NAC5 polypeptide as defined herein or at least part thereof, and have substantially the same biological activity as the amino acid sequence given in Table C herein and encoded by the nucleic acid from which the portion is derived. Preferably, the portion is a portion of a nucleic acid encoding any one of the proteins given in Table C or is a portion of a nucleic acid encoding an orthologue or paralogue of any one of the amino acid sequences given in Table C. Preferably the portion is at least 500, 550, 600, 650, 700, 750, 800, 850, 900, 950, 1000 consecutive nucleotides in length, the consecutive nucleotides being of any one of the nucleic acid sequences given in Table C herein, or of a nucleic acid encoding an orthologue or paralogue of any one of the amino acid sequences given in Table C. Most preferably the portion is a portion of a nucleic acid encoding SEQ ID NO: 2 or SEQ ID NO: 4. Preferably, the portion encodes a fragment of an amino acid sequence which comprises one or more of motifs I to XI (SEQ ID NO: 5 to SEQ ID NO: 15) and/or has the same biological activity as a NAC1 or NAC5 and/or has at least 50%, 55%, 60%, 65%, 70%, 75%, 80%, 85%, 90%, 95% or more sequence identity to SEQ ID NO: 2 or to SEQ ID NO: 4.

[0139] Another nucleic acid variant useful in the methods of the invention is a nucleic acid capable of hybridising, under reduced or medium stringency conditions, preferably under stringent conditions, with the complement of a nucleic acid encoding a NAC1 or NAC5 polypeptide as defined herein, or with a portion as defined herein. According to the present invention, there is provided a method for enhancing yield-related traits in plants grown under abiotic stress conditions, comprising introducing and expressing in a plant a nucleic acid capable of hybridizing to a nucleic acid encoding any one of the proteins given in Table C herein, or to a nucleic acid encoding an orthologue, paralogue or homologue of any of the nucleic acid sequences given in Table C.

[0140] Hybridising sequences useful in the methods of the invention encode a NAC1 or NAC5 polypeptide as defined herein, having substantially the same biological activity as the amino acid sequence given in Table C encoded by the nucleic acid to which the hybridising sequence hybridises. Preferably, the hybridising sequence is capable of hybridising to the complement of a nucleic acid encoding any one of the proteins given in Table C herein, or to a portion of any of these sequences, a portion being as defined herein, or the hybridising sequence is capable of hybridising to the complement of a nucleic acid encoding an orthologue or paralogue of any one of the amino acid sequences given in Table C. Most preferably, the hybridising sequence is capable of hybridising to the complement of a nucleic acid encoding the polypeptide as represented by SEQ ID NO: 2 or SEQ ID NO: 4 or to a portion of either. In one embodiment, the hybridization conditions are medium stringency, preferably high stringency, as defined herein.

[0141] Preferably, the hybridising sequence encodes a polypeptide with an amino acid sequence comprising one or more of motifs I to XI (SEQ ID NO: 5 to SEQ ID NO: 15) and/or has the same biological activity as a NAC1 or NAC5 and/or has at least 50%, 55%, 60%, 65%, 70%, 75%, 80%, 85%, 90%, 95% or more sequence identity to SEQ ID NO: 2 or to SEQ ID NO: 4.

[0142] In another embodiment, there is provided a method for enhancing yield-related traits in plants grown under abiotic stress conditions, comprising introducing and expressing in a plant a splice variant or allelic variant of any one of a nucleic acid encoding any one of the proteins given in Table C herein or a splice variant or allelic variant of a nucleic acid encoding an orthologue, paralogue or homologue of any of the amino acid sequences given in Table C herein.

[0143] Preferred splice or allelic variants are splice or allelic variants of a nucleic acid encoding SEQ ID NO: 2 or SEQ ID NO: 4, or a splice or allelic variant of a nucleic acid encoding an orthologue or paralogue of SEQ ID NO: 2 or SEQ ID NO: 4. Preferably, the amino acid sequence encoded by the splice variant or allelic variant comprises one or more of motifs I to XI (SEQ ID NO: 5 to SEQ ID NO: 15) and/or has the same biological activity as a NAC1 or NAC5 and/or has at least 50%, 55%, 60%, 65%, 70%, 75%, 80%, 85%, 90%, 95% or more sequence identity to SEQ ID NO: 2 or to SEQ ID NO: 4.

[0144] According to a further embodiment, there is provided a method for enhancing yield-related traits in plants grown under abiotic stress conditions, comprising introducing and expressing in a plant an allelic variant or splice variant of a nucleic acid encoding any one of the proteins given in Table C herein, or comprising introducing and expressing in a plant an allelic variant or splice variant of a nucleic acid encoding an orthologue, paralogue or homologue of any of the amino acid sequences given in Table C herein.

[0145] The polypeptides encoded by allelic variants or splice variants useful in the methods of the present invention have substantially the same biological activity as the NAC1 polypeptide of SEQ ID NO: 2 or the NAC5 polypeptide of SEQ ID NO: 5 or of any of the amino acids depicted in Table C herein. Allelic variants exist in nature, and encompassed within the methods of the present invention is the use of these natural alleles. Preferably, the allelic variant or splice variant is a variant of a nucleic acid encoding SEQ ID NO: 2 or SEQ ID NO: 4 or a variant of a nucleic acid encoding an orthologue or paralogue of SEQ ID NO: 2 or SEQ ID NO: 4. Preferably, the amino acid sequence encoded by the allelic variant or splice variant comprises one or more of motifs I to XI (SEQ ID NO: 5 to SEQ ID NO: 15) and/or has the same biological activity as a NAC1 or NAC5 and/or has at least 50%, 55%, 60%, 65%, 70%, 75%, 80%, 85%, 90%, 95% or more sequence identity to SEQ ID NO: 2 or to SEQ ID NO: 4.

[0146] In yet another embodiment, there is provided a method for enhancing yield-related traits in plants grown under abiotic stress conditions, comprising introducing and expressing in a plant a variant of a nucleic acid encoding any one of the proteins given in Table C herein, or comprising introducing and expressing in a plant a variant of a nucleic acid encoding an orthologue, paralogue or homologue of any of the amino acid sequences given in Table C, which variant nucleic acid is obtained by gene shuffling.

[0147] Preferably, the amino acid sequence encoded by the variant nucleic acid obtained by gene shuffling comprises one or more of motifs I to XI (SEQ ID NO: 5 to SEQ ID NO: 15) and/or has the same biological activity as a NAC1 or NAC5 and/or has at least 50%, 55%, 60%, 65%, 70%, 75%, 80%, 85%, 90%, 95% or more sequence identity to SEQ ID NO: 2 or to SEQ ID NO: 4.

[0148] Furthermore, nucleic acid variants may also be obtained by site-directed mutagenesis. Several methods are available to achieve site-directed mutagenesis, the most common being PCR based methods (Current Protocols in Molecular Biology. Wiley Eds.). NCG polypeptides differing from the sequence of SEQ ID NO: 2 or SEQ ID NO: 4 by one or several amino acids (substitution(s), insertion(s) and/or deletion(s) as defined herein) may equally be useful to increase the yield of plants in the methods and constructs and plants of the invention.

[0149] Nucleic acids encoding a NAC1 or NAC5 polypeptide may be derived from any natural or artificial source. The nucleic acid may be modified from its native form in composition and/or genomic environment through deliberate human manipulation. Preferably the NAC1 or NAC5 polypeptide-encoding nucleic acid is from a plant, further preferably from a monocotyledonous plant, more preferably from the family Poaceae, most preferably the nucleic acid is from Oryza sativa.

[0150] In another embodiment the present invention extends to recombinant chromosomal DNA comprising a nucleic acid sequence useful in the methods of the invention, wherein said nucleic acid is present in the chromosomal DNA as a result of recombinant methods, but is not in its natural genetic environment. In a further embodiment the recombinant chromosomal DNA of the invention is comprised in a plant cell.

[0151] Performance of the methods of the invention gives plants having enhanced yield-related traits. In particular, performance of the methods of the invention gives plants having increased seed or grain yield and/or modified root architecture. The term “seed yield” is described in more detail in the “definitions” section herein. The term “modified root architecture” as defined herein preferably comprises or is due to an increase or change in any one or more of the following: an increase in root biomass in the form of fresh weight or dry weight, increased number of roots, increased root diameter, enlarged roots, enlarged stele, enlarged aerenchyma, increased aerenchyma formation, enlarged cortex, enlarged cortical cells, enlarged xylem, modified branching, improved penetration ability, enlarged epidermis, increase in the ratio of roots to shoots.

[0152] The present invention therefore provides a method for increasing seed yield and/or modified root architecture relative to control plants, which method comprises modulating expression in a plant grown under abiotic stress conditions of a nucleic acid encoding a NAC1 and NAC5 polypeptide.

[0153] The present invention also provides a method for increasing abiotic stress tolerance in plants relative to control plants, which method comprises modulating expression in a plant grown under abiotic stress conditions of a nucleic acid encoding a NAC1 and NAC5 polypeptide.

[0154] According to a preferred feature of the present invention, performance of the methods of the invention gives plants grown under abiotic stress conditions increased growth rate relative to control plants. Therefore, according to the present invention, there is provided a method for increasing the growth rate of plants, which method comprises modulating expression of a nucleic acid encoding a NAC1 or NAC5 polypeptide in a plant grown under abiotic stress conditions.

[0155] Performance of the methods of the invention in plants during their vegetative growth stage, which plants are grown under non-stress conditions or under mild drought conditions, gives enhanced yield-related traits and/or modified root architecture relative to control plants grown under comparable conditions. Therefore, according to the present invention, there is provided a method for enhancing yield-related traits and/or modifying root architecture in plants during their vegetative growth phase and grown under non-stress conditions or under mild drought conditions, which method comprises modulating expression in said plants of a nucleic acid encoding a NAC1 or NAC5 polypeptide.

[0156] Performance of the methods of the invention gives plants grown under conditions of drought, enhanced yield-related traits and/or modified root architecture relative to control plants grown under comparable conditions. Therefore, according to the present invention, there is provided a method for enhancing yield-related traits and/or modifying root architecture in plants grown under conditions of drought, which method comprises modulating expression in a plant of a nucleic acid encoding a NAC1 or NAC5 polypeptide under the control of a tissue-specific promoter, preferably a root-specific promoter.

[0157] Under normal or non-stress growth conditions rice plants expressing a NAC1-encoding nucleic acid sequence when expressed under the control of a constitutive promoter and when expressed under the control of a root-specific promoter gave increased seed yield. In comparison, significantly increased levels of seed or grain yield were obtained under drought conditions in plants expressing a NAC1-encoding nucleic acid under the control of a root-specific promoter. In contrast, there was no noticeable difference in the seed or grain yield of plants grown under drought stress and expressing a NAC1-encoding nucleic acid sequence under the control of a constitutive promoter compared non transgenic controls.

[0158] In the case of NAC5, plants expressing a NAC5-encoding nucleic acid under the control of a root specific promoter and plants expressing a NAC5-encoding nucleic acid under the control of a constitutive promoter showed increased tolerance to drought and high salinity during the vegetative growth phase. Under normal, non-stress growth conditions these plants showed increased seed or grain yield. However, under drought stress, plants expressing a NAC5 under the control of a root-specific promoter showed significantly increased seed or grain yield, whereas plants expressing a NAC5 under the control of a constitutive promoter showed a similar or reduced yield compared to non-transgenic control plants.

[0159] Performance of the methods of the invention gives plants grown under conditions of nutrient deficiency, particularly under conditions of nitrogen deficiency, enhanced yield-related traits and/or modified root architecture relative to control plants grown under comparable conditions. Therefore, according to the present invention, there is provided a method for enhancing yield-related traits and/or modifying root architecture in plants grown under conditions of nutrient deficiency, which method comprises modulating expression in a plant of a nucleic acid encoding a NAC1 or NAC5 polypeptide.

[0160] Performance of the methods of the invention gives plants grown under conditions of salt stress, enhanced yield-related traits and/or modified root architecture relative to control plants grown under comparable conditions. Therefore, according to the present invention, there is provided a method for enhancing yield-related traits and/or modifying root architecture in plants grown under conditions of salt stress, which method comprises modulating expression in a plant of a nucleic acid encoding a NAC1 or NAC5 polypeptide.

[0161] The invention also provides genetic constructs and vectors to facilitate introduction and/or expression in plants of nucleic acids encoding NAC1 or NAC5 polypeptides. The gene constructs may be inserted into vectors, which may be commercially available, suitable for transforming into plants or host cells and suitable for expression of the gene of interest in the transformed cells. The invention also provides use of a gene construct as defined herein in the methods of the invention.

[0162] More specifically, the present invention provides a construct comprising:
[0163] (a) a nucleic acid encoding a NAC1 or NAC5 polypeptide as defined above;
[0164] (b) one or more control sequences capable of driving expression of the nucleic acid sequence of (a); and optionally
[0165] (c) a transcription termination sequence.

[0166] Preferably, the nucleic acid encoding a NAC1 or NAC5 polypeptide is as defined above. The term “control sequence” and “termination sequence” are as defined herein.

[0167] The genetic construct of the invention may be comprised in a host cell, plant cell, seed, agricultural product or plant. Plants or host cells are transformed with a genetic construct such as a vector or an expression cassette comprising any of the nucleic acids described above. Thus the invention furthermore provides plants or host cells transformed with a construct as described above. In particular, the invention provides plants transformed with a construct as described above, which plants have increased yield-related traits as described herein.

[0168] In one embodiment the genetic construct of the invention confers increased yield or yield related traits(s) to a plant when it has been introduced into said plant, which plant expresses the nucleic acid encoding the NAC1 or NAC5 polypeptide comprised in the genetic construct. In another embodiment the genetic construct of the invention confers increased yield or yield related traits(s) to a plant comprising plant cells in which the construct has been introduced, which plant cells express the nucleic acid encoding the NAC1 or NAC5 comprised in the genetic construct.

[0169] The skilled artisan is well aware of the genetic elements that must be present on the genetic construct in order to successfully transform, select and propagate host cells containing the sequence of interest. The sequence of interest is operably linked to one or more control sequences (at least to a promoter).

[0170] Advantageously, any type of promoter, whether natural or synthetic, may be used to drive expression of the nucleic acid sequence during the vegetative growth phase of a plant. Preferably the promoter is of plant origin. See the “Definitions” section herein for definitions of the various promoter types.

[0171] A particularly preferred promoter for use in the methods of the invention is a root-specific promoter. The root-specific promoter is preferably an RCc3 promoter (Plant Mol Biol. 1995 January; 27(2):237-48) or a promoter of substantially the same strength and having substantially the same expression pattern (a functionally equivalent promoter), more preferably the RCc3 promoter is from rice, further preferably the RCc3 promoter is represented by a nucleic acid sequence substantially similar to SEQ ID NO: 21, most preferably the promoter is as represented by SEQ ID NO: 21. Examples of other root-specific promoters which may also be used to perform the methods of the invention are shown in Table 2b in the “Definitions” section.

[0172] A constitutive promoter may also be used in plants grown under stress or non-stress conditions, particularly during the vegetative growth phase of a plant. A constitutive promoter may also be used in plants grown under substantially non-stress conditions and expressing a NAC1 or NAC5-encoding nucleic acid. The constitutive promoter is preferably a ubiquitous constitutive promoter of medium strength. More preferably it is a plant derived promoter, e.g. a promoter of plant chromosomal origin, such as a GOS2 promoter or a promoter of substantially the same strength and having substantially the same expression pattern (a functionally equivalent promoter), more preferably the promoter is the promoter GOS2 promoter from rice. Further preferably the constitutive promoter is represented by a nucleic acid sequence substantially similar to SEQ ID NO: 20, most preferably the constitutive promoter is as represented by SEQ ID NO: 20. See the “Definitions” section herein for further examples of constitutive promoters.

[0173] It should be clear that the applicability of the present invention is not restricted to the NAC1 or NAC5 polypeptide-encoding nucleic acid represented by SEQ ID NO: 1 or SEQ ID NO: 3, nor is the applicability of the invention restricted to the rice GOS2 or RCc3 promoters for driving expression of a NAC1 or NAC5 in a plant.

[0174] Optionally, one or more terminator sequences may be used in the construct introduced into a plant. Those skilled in the art will be aware of terminator sequences that may be suitable for use in performing the invention.

[0175] Preferably, the construct comprises an expression cassette comprising an RCc3 promoter operably linked to the nucleic acid encoding the NAC1 or NAC5 polypeptide. More preferably, the construct furthermore comprises a zein terminator (t-zein) linked to the 3′ end of the NAC1 or NAC5 coding sequence. Furthermore, one or more sequences encoding selectable markers may be present on the construct introduced into a plant.

[0176] According to a preferred feature of the invention, the modulated expression is increased expression. Methods for increasing expression of nucleic acids or genes, or gene products, are well documented in the art and examples are provided in the definitions section.

[0177] As mentioned above, a preferred method for modulating expression of a nucleic acid encoding a NAC1 or NAC5 polypeptide is by introducing and expressing in a plant a nucleic acid encoding a NAC1 or NAC5 polypeptide; however the effects of performing the method, i.e. enhancing yield-related traits and/or modifying root architecture may also be achieved using other well-known techniques, including but not limited to T-DNA activation tagging, TILLING, homologous recombination. A description of these techniques is provided in the definitions section.

[0178] The invention also provides a method for the production of transgenic plants having enhanced yield-related traits and/or modified root architecture relative to control plants, comprising introduction and expression in a plant of any nucleic acid encoding a NAC1 or NAC5 polypeptide as defined herein.

[0179] More specifically, the present invention provides a method for the production of transgenic plants having enhanced yield-related traits, particularly increased seed yield and/or modified root architecture, which method comprises:
[0180] (i) introducing and expressing in a plant or plant cell a NAC1 or NAC5 polypeptide-encoding nucleic acid or a genetic construct comprising a NAC1 or NAC5 polypeptide-encoding nucleic acid; and
[0181] (ii) cultivating the plant cell under abiotic stress conditions.

[0182] The nucleic acid of (i) may be any of the nucleic acids capable of encoding a NAC1 or NAC5 polypeptide as defined herein.

[0183] Cultivating the plant cell, may or may not include regeneration and/or growth to maturity. Accordingly, in a particular embodiment of the invention, the plant cell transformed by the method according to the invention is regenerable into a transformed plant. In another particular embodiment, the plant cell transformed by the method according to the invention is not regenerable into a transformed plant, i.e. cells that are not capable to regenerate into a plant using cell culture techniques known in the art. While plants cells generally have the characteristic of totipotency, some plant cells cannot be used to regenerate or propagate intact plants from said cells. In one embodiment of the invention the plant cells of the invention are such cells. In another embodiment the plant cells of the invention are plant cells that do not sustain themselves in an autotrophic way.

[0184] The nucleic acid may be introduced directly into a plant cell or into the plant itself (including introduction into a tissue, organ or any other part of a plant). According to a preferred feature of the present invention, the nucleic acid is preferably introduced into a plant or plant cell by transformation. The term “transformation” is described in more detail in the “definitions” section herein.

[0185] In one embodiment the present invention extends to any plant cell or plant produced by any of the methods described herein, and to all plant parts and propagules thereof.

[0186] The present invention encompasses plants or parts thereof (including seeds) obtainable by the methods according to the present invention. The plants or plant parts or plant cells comprise a nucleic acid transgene encoding a NAC1 or NAC5 polypeptide as defined above, preferably in a genetic construct such as an expression cassette. The present invention extends further to encompass the progeny of a primary transformed or transfected cell, tissue, organ or whole plant that has been produced by any of the aforementioned methods, the only requirement being that progeny exhibit the same genotypic and/or phenotypic characteristic(s) as those produced by the parent in the methods according to the invention.

[0187] In a further embodiment the invention extends to seeds comprising the expression cassettes of the invention, the genetic constructs of the invention, or the nucleic acids encoding the NAC1 or NAC5 and/or the NAC1 or NAC5 polypeptides as described above.

[0188] The invention also includes host cells containing an isolated nucleic acid encoding a NAC1 or NAC5 polypeptide as defined above. In one embodiment host cells according to the invention are plant cells, yeasts, bacteria or fungi. Host plants for the nucleic acids, construct, expression cassette or the vector used in the method according to the invention are, in principle, advantageously all plants which are capable of synthesizing the polypeptides used in the inventive method. In a particular embodiment the plant cells of the invention overexpress the nucleic acid molecule of the invention.

[0189] The methods of the invention are advantageously applicable to any plant, in particular to any plant as defined herein. Plants that are particularly useful in the methods of the invention include all plants which belong to the superfamily Viridiplantae, in particular monocotyledonous and dicotyledonous plants including fodder or forage legumes, ornamental plants, food crops, trees or shrubs. According to an embodiment of the present invention, the plant is a crop plant. Examples of crop plants include but are not limited to chicory, carrot, cassava, trefoil, soybean, beet, sugar beet, sunflower, canola, alfalfa, rapeseed, linseed, cotton, tomato, potato and tobacco. According to another embodiment of the present invention, the plant is a monocotyledonous plant. Examples of monocotyledonous plants include sugarcane. According to another embodiment of the present invention, the plant is a cereal. Examples of cereals include rice, maize, wheat, barley, millet, rye, triticale, sorghum, emmer, spelt, einkorn, teff, milo and oats. In a particular embodiment the plants used in the methods of the invention are selected from the group consisting of maize, wheat, rice, soybean, cotton, oilseed rape including canola, sugarcane, sugar beet and alfalfa. Advantageously the methods of the invention are more efficient than the known methods, because the plants of the invention have increased yield and/or tolerance to an environmental stress compared to control plants used in comparable methods.

[0190] The invention also extends to harvestable parts of a plant such as, but not limited to seeds, leaves, fruits, flowers, stems, roots, rhizomes, tubers and bulbs, which harvestable parts comprise a recombinant nucleic acid encoding a NAC1 or NAC5 polypeptide. The invention furthermore relates to products derived or produced, preferably directly derived or produced, from a harvestable part of such a plant, such as dry pellets, meal or powders, oil, fat and fatty acids, starch or proteins.

[0191] The invention also includes methods for manufacturing a product comprising a) growing the plants of the invention and b) producing said product from or by the plants of the invention or parts thereof, including seeds. In a further embodiment the methods comprise the steps of a) growing the plants of the invention, b) removing the harvestable parts as described herein from the plants and c) producing said product from, or with the harvestable parts of plants according to the invention.

[0192] In one embodiment the products produced by the methods of the invention are plant products such as, but not limited to, a foodstuff, feedstuff, a food supplement, feed supplement, fiber, cosmetic or pharmaceutical. In another embodiment the methods for production are used to make agricultural products such as, but not limited to, plant extracts, proteins, amino acids, carbohydrates, fats, oils, polymers, vitamins, and the like.

[0193] In yet another embodiment the polynucleotides or the polypeptides of the invention are comprised in an agricultural product. In a particular embodiment the nucleic acid sequences and protein sequences of the invention may be used as product markers, for example where an agricultural product was produced by the methods of the invention. Such a marker can be used to identify a product to have been produced by an advantageous process resulting not only in a greater efficiency of the process but also improved quality of the product due to increased quality of the plant material and harvestable parts used in the process. Such markers can be detected by a variety of methods known in the art, for example but not limited to PCR based methods for nucleic acid detection or antibody based methods for protein detection.

[0194] The present invention also encompasses use of nucleic acids encoding NAC1 or NAC5 polypeptides as described herein and use of these NAC1 or NAC5 polypeptides in enhancing any of the aforementioned yield-related traits or in modifying root architecture in plants. For example, nucleic acids encoding NAC1 or NAC5 polypeptide described herein, or the NAC1 or NAC5 polypeptides themselves, may find use in breeding programmes in which a DNA marker is identified which may be genetically linked to a NAC1 or NAC5 polypeptide-encoding gene. The nucleic acids/genes, or the NAC1 or NAC5 polypeptides themselves may be used to define a molecular marker. This DNA or protein marker may then be used in breeding programmes to select plants having enhanced yield-related traits or modified root architecture as defined herein in the methods of the invention. Furthermore, allelic variants of a NAC1 or NAC5 polypeptide-encoding nucleic acid/gene may find use in marker-assisted breeding programmes. Nucleic acids encoding NAC1 or NAC5 polypeptides may also be used as probes for genetically and physically mapping the genes that they are a part of, and as markers for traits linked to those genes. Such information may be useful in plant breeding in order to develop lines with desired phenotypes.

[0195] Furthermore, the present invention relates to the following specific embodiments.
[0196] A: A method for enhancing yield-related traits in plants relative to control plants, comprising modulating expression in a plant of a NAC up-regulated gene (NUG) encoding any one of the polypeptides given in Table A or Table B or a homologue thereof.
[0197] B: A method for enhancing yield-related traits and/or for modifying root architecture in plants grown under abiotic stress, comprising modulating expression in a plant of nucleic acid encoding a NAC1 or NAC5 polypeptide or homologue therefore, which nucleic acid is operably linked to a tissue-specific promoter.
[0198] C: Method according to embodiment A or embodiment B, wherein said modulated expression is effected by introducing and expressing in a plant a nucleic acid encoding a NUG, NAC1 or NAC5 polypeptide or a homologue thereof.
[0199] D: Method according to embodiment A, wherein said enhanced yield-related traits comprise increased yield and/or biomass relative to control plants.
[0200] E: Method according to embodiment B, wherein said enhanced yield-related traits comprise increased seed or grain yield and/or wherein said modified root architecture comprises or is due to an increase or change in any one or more of the following: an increase in root biomass in the form of fresh weight or dry weight, increased number of roots, increased root diameter, enlarged roots, enlarged stele, enlarged aerenchyma, increased aerenchyma formation, enlarged cortex, enlarged cortical cells, enlarged xylem, modified branching, improved penetration ability, enlarged epidermis, increase in the ratio of roots to shoots.
[0201] F: Method according to any one of embodiments A or C to E, wherein said enhanced yield-related traits are obtained under non-stress conditions.
[0202] G: Method according to any one of embodiments A to F, wherein said enhanced yield-related traits are obtained under conditions of drought stress, salt stress or nitrogen deficiency.
[0203] H: Method according to any one of embodiments B to G, wherein said NAC1 or NAC5 polypeptide comprises one or more of the motifs represented by SEQ ID NO: 5 to SEQ ID NO: 15.
[0204] I: Method according to any one of embodiments A to H, wherein said nucleic acid encoding a NUG, NAC1 or NAC5 is of plant origin, preferably from a monocotyledonous plant, further preferably from the family Poaceae, more preferably from the genus Oryza, most preferably from Oryza sativa.
[0205] J: Method according to any one of embodiments A to I, wherein said nucleic acid encoding a NUG, NAC1 or NAC5 encodes any one of the polypeptides listed in Table A, Table B or Table C or is a portion of such a nucleic acid, or a nucleic acid capable of hybridising with such a nucleic acid.
[0206] K: Method according to any one of embodiments A to J, wherein said nucleic acid sequence encodes an orthologue or paralogue of any of the polypeptides given in Table A, Table B or Table C.
[0207] L: Method according to any one of embodiments A to K, wherein said nucleic acid encodes the NAC1 polypeptide represented by SEQ ID NO: 2.
[0208] M: Method according to any one of embodiments A to L, wherein said nucleic acid encodes the NAC5 polypeptide represented by SEQ ID NO: 4.
[0209] N: Method according to any one of embodiments A and C to M, wherein said nucleic acid is operably linked to a constitutive promoter of plant origin, preferably to a medium strength constitutive promoter of plant origin, more preferably to a GOS2 promoter, most preferably to a GOS2 promoter from rice.
[0210] O: Method according to any one of embodiments B to M, wherein said tissue specific promoter is a root-specific promoter, preferably an RCc3 promoter, further preferably an RCc3 promoter from rice.
[0211] P: Plant, or part thereof, or plant cell, obtainable by a method according to any one of embodiments A to O, wherein said plant, plant part or plant cell comprises a recombinant nucleic acid encoding a NUG, NAC1 or NAC5 polypeptide as given in Table A, Table B or Table C or a homologue, paralogue or orthologue thereof.
[0212] Q: Construct comprising:
   [0213] (i) nucleic acid encoding an NUG, NAC1, NAC5 as given in Table A, Table B or Table C or a homologue, paralogue or orthologue thereof;
   [0214] (ii) one or more control sequences capable of driving expression of the nucleic acid sequence of (i); and optionally
   [0215] (iii) a transcription termination sequence.
[0216] R: Construct according to embodiment Q, wherein said nucleic acid is operably linked to a constitutive promoter of plant origin, preferably to a medium strength constitutive promoter of plant origin, more preferably to a GOS2 promoter, most preferably to a GOS2 promoter from rice.
[0217] S: Construct according to embodiment Q, wherein said nucleic acid is operably linked to a tissue specific promoter, preferably to a root-specific promoter, preferably to an RCc3 promoter, further preferably an RCc3 promoter from rice.
[0218] T: Use of a construct according to any one of embodiments Q to S in a method for making plants having enhanced yield-related traits, preferably increased seed yield and/or increased biomass and/or modified root architecture relative to control plants.
[0219] U: Plant, plant part or plant cell transformed with a construct according to any one of embodiments Q to S.
[0220] V: Method for the production of a transgenic plant having enhanced yield-related traits relative to control plants, preferably increased and/or increased seed yield and/or increased biomass relative to control plants, comprising:
   [0221] (i) introducing and expressing in a plant cell or plant a nucleic acid encoding a NUG polypeptide as given in Table A or Table B or a homologue, paralogue or orthologue thereof; and
   [0222] (ii) cultivating said plant cell or plant of (i) under conditions promoting plant growth and development; or
   [0223] (iii) introducing and expressing in a plant cell or plant a nucleic acid encoding a NAC1 or NAC5 polypeptide as given in Table C or a homologue, paralogue or orthologue thereof, which nucleic acid is operably linked to a tissue-specific promoter; and
   [0224] (iv) cultivating said plant cell or plant from step (iii) under abiotic stress conditions, wherein said plants have increased seed yield and modified root architecture.
[0225] W: Transgenic plant having enhanced yield-related traits relative to control plants resulting from modulated expression of a nucleic acid encoding an NUG, NAC1 or NAC5 polypeptide as given in Table A, Table B or Table C or a homologue, paralogue or orthologue thereof.
[0226] X: Transgenic plant according to embodiment P, U or W or a transgenic plant cell derived therefrom, wherein said plant is a crop plant, such as beet, sugarbeet or alfalfa; or a monocotyledonous plant such as sugarcane; or a cereal, such as rice, maize, wheat, barley, millet, rye, triticale, sorghum, emmer, spelt, einkorn, teff, milo or oats.
[0227] Y: Harvestable parts of a plant according to embodiment X, wherein said harvestable parts are preferably root biomass and/or seeds.
[0228] Z: Products derived from a plant according to embodiment X and/or from harvestable parts of a plant according to embodiment Y.
[0229] A′: Use of a nucleic acid encoding an NUG, NAC1 or NAC5 polypeptide as given in Table A, Table B or Table C or a homologue, paralogue or orthologue thereof for enhancing yield-related traits in plants relative to control plants.
[0230] B′ A method for manufacturing a product, comprising the steps of growing the plants according to embodiment P, U, W or X and producing said product from or by said plants, or parts thereof, including seeds.

### DEFINITIONS

[0231] The following definitions will be used throughout the present application. The section captions and headings in this application are for convenience and reference purpose only and should not affect in any way the meaning or interpretation of this application. The technical terms and expressions used within the scope of this application are generally to be given the meaning commonly applied to them in the pertinent art of plant biology, molecular biology, bioinformatics and plant breeding. All of the following term definitions apply to the complete content of this application. The term “essentially”, “about”, “approximately” and the like in connection with an attribute or a value, particularly also define exactly the attribute or exactly the value, respectively. The term “about” in the context of a given numeric value or range relates in particular to a value or range that is within 20%, within 10%, or within 5% of the value or range given.

### Peptide(s)/Protein(s)

[0232] The terms “peptides”, “oligopeptides”, “polypeptide” and “protein” are used interchangeably herein and refer to amino acids in a polymeric form of any length, linked together by peptide bonds, unless mentioned herein otherwise.

### Polynucleotide(s)/Nucleic Acid(s)/Nucleic Acid Sequence(s)/Nucleotide Sequence(s)

[0233] The terms “polynucleotide(s)”, “nucleic acid sequence(s)”, “nucleotide sequence(s)”, “nucleic acid(s)”, “nucleic acid molecule” are used interchangeably herein and refer to nucleotides, either ribonucleotides or deoxyribonucleotides or a combination of both, in a polymeric unbranched form of any length.

### Homologue(s)

[0234] “Homologues” of a protein encompass peptides, oligopeptides, polypeptides, proteins and enzymes having amino acid substitutions, deletions and/or insertions relative to the unmodified protein in question and having similar biological and functional activity as the unmodified protein from which they are derived.

[0235] Orthologues and paralogues are two different forms of homologues and encompass evolutionary concepts used to describe the ancestral relationships of genes. Paralogues are genes within the same species that have originated through duplication of an ancestral gene; orthologues are genes from different organisms that have originated through speciation, and are also derived from a common ancestral gene.

[0236] A “deletion” refers to removal of one or more amino acids from a protein.

[0237] An “insertion” refers to one or more amino acid residues being introduced into a predetermined site in a protein. Insertions may comprise N-terminal and/or C-terminal fusions as well as intra-sequence insertions of single or multiple amino acids. Generally, insertions within the amino acid sequence will be smaller than N- or C-terminal fusions, of the order of about 1 to 10 residues. Examples of N- or C-terminal fusion proteins or peptides include the binding domain or activation domain of a transcriptional activator as used in the yeast two-hybrid system, phage coat proteins, (histidine)-6-tag, glutathione S-transferase-tag, protein A, maltose-binding protein, dihydrofolate reductase, Tag•100 epitope, c-myc epitope, FLAG®-epitope, lacZ, CMP (calmodulin-binding peptide), HA epitope, protein C epitope and VSV epitope.

[0238] A “substitution” refers to replacement of amino acids of the protein with other amino acids having similar properties (such as similar hydrophobicity, hydrophilicity, antigenicity, propensity to form or break α-helical structures or β-sheet structures). Amino acid substitutions are typically of single residues, but may be clustered depending upon functional constraints placed upon the polypeptide and may range from 1 to 10 amino acids. The amino acid substitutions are preferably conservative amino acid substitutions. Conservative substitution tables are well known in the art (see for example Creighton (1984) Proteins. W.H. Freeman and Company (Eds) and Table 1 below).

TABLE 1
Examples of conserved amino acid substitutions

| Residue | Conservative Substitutions |
|---|---|
| Ala | Ser |
| Arg | Lys |
| Asn | Gln; His |
| Asp | Glu |
| Gln | Asn |
| Cys | Ser |
| Glu | Asp |
| Gly | Pro |
| His | Asn; Gln |
| Ile | Leu, Val |
| Leu | Ile; Val |
| Lys | Arg; Gln |
| Met | Leu; Ile |
| Phe | Met; Leu; Tyr |
| Ser | Thr; Gly |
| Thr | Ser; Val |
| Trp | Tyr |
| Tyr | Trp; Phe |
| Val | Ile; Leu |

[0239] Amino acid substitutions, deletions and/or insertions may readily be made using peptide synthetic techniques known in the art, such as solid phase peptide synthesis and the like, or by recombinant DNA manipulation. Methods for the manipulation of DNA sequences to produce substitution, insertion or deletion variants of a protein are well known in the art. For example, techniques for making substitution mutations at predetermined sites in DNA are well known to those skilled in the art and include M13 mutagenesis, T7-Gen in vitro mutagenesis (USB, Cleveland, Ohio), QuickChange Site Directed mutagenesis (Stratagene, San Diego, Calif.), PCR-mediated site-directed mutagenesis or other site-directed mutagenesis protocols (see Current Protocols in Molecular Biology, John Wiley & Sons, N.Y. (1989 and yearly updates)).

### Derivatives

[0240] “Derivatives” include peptides, oligopeptides, polypeptides which may, compared to the amino acid sequence of the naturally-occurring form of the protein, such as the protein of interest, comprise substitutions of amino acids with non-naturally occurring amino acid residues, or additions of non-naturally occurring amino acid residues. “Derivatives” of a protein also encompass peptides, oligopeptides, polypeptides which comprise naturally occurring altered (glycosylated, acylated, prenylated, phosphorylated, myristoylated, sulphated etc.) or non-naturally altered amino acid residues compared to the amino acid sequence of a naturally-occurring form of the polypeptide. A derivative may also comprise one or more non-amino acid substituents or additions compared to the amino acid sequence from which it is derived, for example a reporter molecule or other ligand, covalently or non-covalently bound to the amino acid sequence, such as a reporter molecule which is bound to facilitate its detection, and non-naturally occurring amino acid residues relative to the amino acid sequence of a naturally-occurring protein. Furthermore, “derivatives” also include fusions of the naturally-occurring form of the protein with tagging peptides such as FLAG, HIS6 or thioredoxin (for a review of tagging peptides, see Terpe, Appl. Microbiol. Biotechnol. 60, 523-533, 2003).

### Domain, Motif/Consensus Sequence/Signature

[0241] The term “domain” refers to a set of amino acids conserved at specific positions along an alignment of sequences of evolutionarily related proteins. While amino acids at other positions can vary between homologues, amino acids that are highly conserved at specific positions indicate amino acids that are likely essential in the structure, stability or function of a protein. Identified by their high degree of conservation in aligned sequences of a family of protein homologues, they can be used as identifiers to determine if any polypeptide in question belongs to a previously identified polypeptide family.

[0242] The term “motif” or “consensus sequence” or “signature” refers to a short conserved region in the sequence of evolutionarily related proteins. Motifs are frequently highly conserved parts of domains, but may also include only part of the domain, or be located outside of conserved domain (if all of the amino acids of the motif fall outside of a defined domain).

[0243] Specialist databases exist for the identification of domains, for example, SMART (Schultz et al. (1998) Proc. Natl. Acad. Sci. USA 95, 5857-5864; Letunic et al. (2002) Nucleic Acids Res 30, 242-244), InterPro (Mulder et al., (2003) Nucl. Acids. Res. 31, 315-318), Prosite (Bucher and Bairoch (1994), A generalized profile syntax for biomolecular sequences motifs and its function in automatic sequence interpretation. (In) ISMB-94; Proceedings 2nd International Conference on Intelligent Systems for Molecular Biology. Altman R., Brutlag D., Karp P., Lathrop R., Searls D., Eds., pp53-61, AAAI Press, Menlo Park; Hulo et al., Nucl. Acids. Res. 32:D134-D137, (2004)), or Pfam (Bateman et al., Nucleic Acids Research 30(1): 276-280 (2002)). A set of tools for in silico analysis of protein sequences is available on the ExPASy proteomics server (Swiss Institute of Bioinformatics (Gasteiger et al., ExPASy: the proteomics server for in-depth protein knowledge and analysis, Nucleic Acids Res. 31:3784-3788(2003)). Domains or motifs may also be identified using routine techniques, such as by sequence alignment.

[0244] Methods for the alignment of sequences for comparison are well known in the art, such methods include GAP, BESTFIT, BLAST, FASTA and TFASTA. GAP uses the algorithm of Needleman and Wunsch ((1970) J Mol Biol 48: 443-453) to find the global (i.e. spanning the complete sequences) alignment of two sequences that maximizes the number of matches and minimizes the number of gaps. The BLAST algorithm (Altschul et al. (1990) J Mol Biol 215: 403-10) calculates percent sequence identity and performs a statistical analysis of the similarity between the two sequences. The software for performing BLAST analysis is publicly available through the National Centre for Biotechnology Information (NCBI). Homologues may readily be identified using, for example, the ClustalW multiple sequence alignment algorithm (version 1.83), with the default pairwise alignment parameters, and a scoring method in percentage. Global percentages of similarity and identity may also be determined using one of the methods available in the MatGAT software package (Campanella et al., BMC Bioinformatics. 2003 Jul. 10; 4: 29. MatGAT: an application that generates similarity/identity matrices using protein or DNA sequences.). Minor manual editing may be performed to optimise alignment between conserved motifs, as would be apparent to a person skilled in the art. Furthermore, instead of using full-length sequences for the identification of homologues, specific domains may also be used. The sequence identity values may be determined over the entire nucleic acid or amino acid sequence or over selected domains or conserved motif(s), using the programs mentioned above using the default parameters. For local alignments, the Smith-Waterman algorithm is particularly useful (Smith T F, Waterman M S (1981) J. Mol. Biol 147(1); 195-7).

### Reciprocal BLAST

[0245] Typically, this involves a first BLAST involving BLASTing a query sequence (for example using any of the sequences listed in Table A of the Examples section) against any sequence database, such as the publicly available NCBI database. BLASTN or TBLASTX (using standard default values) are generally used when starting from a nucleotide sequence, and BLASTP or TBLASTN (using standard default values) when starting from a protein sequence. The BLAST results may optionally be filtered. The full-length sequences of either the filtered results or non-filtered results are then BLASTed back (second BLAST) against sequences from the organism from which the query sequence is derived. The results of the first and second BLASTs are then compared. A paralogue is identified if a high-ranking hit from the first blast is from the same species as from which the query sequence is derived, a BLAST back then ideally results in the query sequence amongst the highest hits; an orthologue is identified if a high-ranking hit in the first BLAST is not from the same species as from which the query sequence is derived, and preferably results upon BLAST back in the query sequence being among the highest hits.

[0246] High-ranking hits are those having a low E-value. The lower the E-value, the more significant the score (or in other words the lower the chance that the hit was found by chance). Computation of the E-value is well known in the art. In addition to E-values, comparisons are also scored by percentage identity. Percentage identity refers to the number of identical nucleotides (or amino acids) between the two compared nucleic acid (or polypeptide) sequences over a particular length. In the case of large families, ClustalW may be used, followed by a neighbour joining tree, to help visualize clustering of related genes and to identify orthologues and paralogues.

### Hybridisation

[0247] The term “hybridisation” as defined herein is a process wherein substantially homologous complementary nucleotide sequences anneal to each other. The hybridisation process can occur entirely in solution, i.e. both complementary nucleic acids are in solution. The hybridisation process can also occur with one of the complementary nucleic acids immobilised to a matrix such as magnetic beads, Sepharose beads or any other resin. The hybridisation process can furthermore occur with one of the complementary nucleic acids immobilised to a solid support such as a nitro-cellulose or nylon membrane or immobilised by e.g. photolithography to, for example, a siliceous glass support (the latter known as nucleic acid arrays or microarrays or as nucleic acid chips). In order to allow hybridisation to occur, the nucleic acid molecules are generally thermally or chemically denatured to melt a double strand into two single strands and/or to remove hairpins or other secondary structures from single stranded nucleic acids.

[0248] The term “stringency” refers to the conditions under which a hybridisation takes place. The stringency of hybridisation is influenced by conditions such as temperature, salt concentration, ionic strength and hybridisation buffer composition. Generally, low stringency conditions are selected to be about 30° C. lower than the thermal melting NCGnt (Tₘ) for the specific sequence at a defined ionic strength and pH. Medium stringency conditions are when the temperature is 20° C. below Tₘ, and high stringency conditions are when the temperature is 10° C. below Tₘ. High stringency hybridisation conditions are typically used for isolating hybridising sequences that have high sequence similarity to the target nucleic acid sequence. However, nucleic acids may deviate in sequence and still encode a substantially identical polypeptide, due to the degeneracy of the genetic code. Therefore medium stringency hybridisation conditions may sometimes be needed to identify such nucleic acid molecules.

[0249] The Tₘ is the temperature under defined ionic strength and pH, at which 50% of the target sequence hybridises to a perfectly matched probe. The Tₘ is dependent upon the solution conditions and the base composition and length of the probe. For example, longer sequences hybridise specifically at higher temperatures. The maximum rate of hybridisation is obtained from about 16° C. up to 32° C. below Tₘ. The presence of monovalent cations in the hybridisation solution reduce the electrostatic repulsion between the two nucleic acid strands thereby promoting hybrid formation; this effect is visible for sodium concentrations of up to 0.4M (for higher concentrations, this effect may be ignored). Formamide reduces the melting temperature of DNA-DNA and DNA-RNA duplexes with 0.6 to 0.7° C. for each percent formamide, and addition of 50% formamide allows hybridisation to be performed at 30 to 45° C., though the rate of hybridisation will be lowered. Base pair mismatches reduce the hybridisation rate and the thermal stability of the duplexes. On average and for large probes, the Tₘ decreases about 1° C. per % base mismatch. The Tₘ may be calculated using the following equations, depending on the types of hybrids:

1) DNA-DNA Hybrids (Meinkoth and Wahl, Anal. Biochem., 138: 267-284, 1984):

Tₘ=81.5° C.+16.6×log₁₀[Na⁺]^{a}+0.41×%[G/C^{b}]−500×[L^{c}]⁻¹−0.61×% formamide

### 2) DNA-RNA or RNA-RNA Hybrids:

[0250] Tₘ=79.8° C.+18.5(log₁₀[Na⁺]^{a})+0.58(%G/C^{b})+11.8(%G/C^{b})²×820/L^{c}

### 3) Oligo-DNA or Oligo-RNAs Hybrids:

[0251] For <20 nucleotides: Tₘ=2(Iₙ)

For 20-35 nucleotides: Tₘ=22+1.46(Iₙ)
[0252] ^{a} or for other monovalent cation, but only accurate in the 0.01-0.4 M range.
[0253] ^{b} only accurate for % GC in the 30% to 75% range.
[0254] ^{c} L=length of duplex in base pairs.
[0255] ^{d} oligo, oligonucleotide; Iₙ,=effective length of primer=2×(no. of G/C)+(no. of A/T).

[0256] Non-specific binding may be controlled using any one of a number of known techniques such as, for example, blocking the membrane with protein containing solutions, additions of heterologous RNA, DNA, and SDS to the hybridisation buffer, and treatment with Rnase. For non-homologous probes, a series of hybridizations may be performed by varying one of (i) progressively lowering the annealing temperature (for example from 68° C. to 42° C.) or (ii) progressively lowering the formamide concentration (for example from 50% to 0%). The skilled artisan is aware of various parameters which may be altered during hybridisation and which will either maintain or change the stringency conditions.

[0257] Besides the hybridisation conditions, specificity of hybridisation typically also depends on the function of post-hybridisation washes. To remove background resulting from non-specific hybridisation, samples are washed with dilute salt solutions. Critical factors of such washes include the ionic strength and temperature of the final wash solution: the lower the salt concentration and the higher the wash temperature, the higher the stringency of the wash. Wash conditions are typically performed at or below hybridisation stringency. A positive hybridisation gives a signal that is at least twice of that of the background. Generally, suitable stringent conditions for nucleic acid hybridisation assays or gene amplification detection procedures are as set forth above. More or less stringent conditions may also be selected. The skilled artisan is aware of various parameters which may be altered during washing and which will either maintain or change the stringency conditions.

[0258] For example, typical high stringency hybridisation conditions for DNA hybrids longer than 50 nucleotides encompass hybridisation at 65° C. in 1×SSC or at 42° C. in 1×SSC and 50% formamide, followed by washing at 65° C. in 0.3×SSC. Examples of medium stringency hybridisation conditions for DNA hybrids longer than 50 nucleotides encompass hybridisation at 50° C. in 4×SSC or at 40° C. in 6×SSC and 50% formamide, followed by washing at 50° C. in 2×SSC. The length of the hybrid is the anticipated length for the hybridising nucleic acid. When nucleic acids of known sequence are hybridised, the hybrid length may be determined by aligning the sequences and identifying the conserved regions described herein. 1×SSC is 0.15M NaCl and 15 mM sodium citrate; the hybridisation solution and wash solutions may additionally include 5×Denhardt's reagent, 0.5-1.0% SDS, 100 μg/ml denatured, fragmented salmon sperm DNA, 0.5% sodium pyrophosphate.

[0259] For the purposes of defining the level of stringency, reference can be made to Sambrook et al. (2001) Molecular Cloning: a laboratory manual, 3rd Edition, Cold Spring Harbor Laboratory Press, CSH, New York or to Current Protocols in Molecular Biology, John Wiley & Sons, N.Y. (1989 and yearly updates).

### Splice Variant

[0260] The term “splice variant” as used herein encompasses variants of a nucleic acid sequence in which selected introns and/or exons have been excised, replaced, displaced or added, or in which introns have been shortened or lengthened. Such variants will be ones in which the biological activity of the protein is substantially retained; this may be achieved by selectively retaining functional segments of the protein. Such splice variants may be found in nature or may be manmade. Methods for predicting and isolating such splice variants are well known in the art (see for example Foissac and Schiex (2005) BMC Bioinformatics 6: 25).

### Allelic Variant

[0261] “Alleles” or “allelic variants” are alternative forms of a given gene, located at the same chromosomal position. Allelic variants encompass Single Nucleotide Polymorphisms (SNPs), as well as Small Insertion/Deletion Polymorphisms (INDELs). The size of INDELs is usually less than 100 bp. SNPs and INDELs form the largest set of sequence variants in naturally occurring polymorphic strains of most organisms.

### Endogenous Gene

[0262] Reference herein to an “endogenous” gene not only refers to the gene in question as found in a plant in its natural form (i.e., without there being any human intervention), but also refers to that same gene (or a substantially homologous nucleic acid/gene) in an isolated form subsequently (re)introduced into a plant (a transgene). For example, a transgenic plant containing such a transgene may encounter a substantial reduction of the transgene expression and/or substantial reduction of expression of the endogenous gene. The isolated gene may be isolated from an organism or may be manmade, for example by chemical synthesis.

### Gene Shuffling/Directed Evolution

[0263] “Gene shuffling” or “directed evolution” consists of iterations of DNA shuffling followed by appropriate screening and/or selection to generate variants of nucleic acids or portions thereof encoding proteins having a modified biological activity (Castle et al., (2004) Science 304(5674): 1151-4; U.S. Pat. Nos. 5,811,238 and 6,395,547).

### Construct

[0264] Artificial DNA (such as but, not limited to plasmids or viral DNA) capable of replication in a host cell and used for introduction of a DNA sequence of interest into a host cell or host organism. Host cells of the invention may be any cell selected from bacterial cells, such as Escherichia coli or Agrobacterium species cells, yeast cells, fungal, algal or cyanobacterial cells or plant cells. The skilled artisan is well aware of the genetic elements that must be present on the genetic construct in order to successfully transform, select and propagate host cells containing the sequence of interest. The sequence of interest is operably linked to one or more control sequences (at least to a promoter) as described herein. Additional regulatory elements may include transcriptional as well as translational enhancers. Those skilled in the art will be aware of terminator and enhancer sequences that may be suitable for use in performing the invention. An intron sequence may also be added to the 5′ untranslated region (UTR) or in the coding sequence to increase the amount of the mature message that accumulates in the cytosol, as described in the definitions section. Other control sequences (besides promoter, enhancer, silencer, intron sequences, 3′UTR and/or 5′UTR regions) may be protein and/or RNA stabilizing elements. Such sequences would be known or may readily be obtained by a person skilled in the art.

[0265] The genetic constructs of the invention may further include an origin of replication sequence that is required for maintenance and/or replication in a specific cell type. One example is when a genetic construct is required to be maintained in a bacterial cell as an episomal genetic element (e.g. plasmid or cosmid molecule). Preferred origins of replication include, but are not limited to, the f1-ori and colE1.

[0266] For the detection of the successful transfer of the nucleic acid sequences as used in the methods of the invention and/or selection of transgenic plants comprising these nucleic acids, it is advantageous to use marker genes (or reporter genes). Therefore, the genetic construct may optionally comprise a selectable marker gene. Selectable markers are described in more detail in the “definitions” section herein. The marker genes may be removed or excised from the transgenic cell once they are no longer needed. Techniques for marker removal are known in the art, useful techniques are described above in the definitions section.

### Regulatory Element/Control Sequence/Promoter

[0267] The terms “regulatory element”, “control sequence” and “promoter” are all used interchangeably herein and are to be taken in a broad context to refer to regulatory nucleic acid sequences capable of effecting expression of the sequences to which they are ligated. The term “promoter” typically refers to a nucleic acid control sequence located upstream from the transcriptional start of a gene and which is involved in recognising and binding of RNA polymerase and other proteins, thereby directing transcription of an operably linked nucleic acid. Encompassed by the aforementioned terms are transcriptional regulatory sequences derived from a classical eukaryotic genomic gene (including the TATA box which is required for accurate transcription initiation, with or without a CCAAT box sequence) and additional regulatory elements (i.e. upstream activating sequences, enhancers and silencers) which alter gene expression in response to developmental and/or external stimuli, or in a tissue-specific manner. Also included within the term is a transcriptional regulatory sequence of a classical prokaryotic gene, in which case it may include a −35 box sequence and/or −10 box transcriptional regulatory sequences. The term “regulatory element” also encompasses a synthetic fusion molecule or derivative that confers, activates or enhances expression of a nucleic acid molecule in a cell, tissue or organ.

[0268] A “plant promoter” comprises regulatory elements, which mediate the expression of a coding sequence segment in plant cells. Accordingly, a plant promoter need not be of plant origin, but may originate from viruses or micro-organisms, for example from viruses which attack plant cells. The “plant promoter” can also originate from a plant cell, e.g. from the plant which is transformed with the nucleic acid sequence to be expressed in the inventive process and described herein. This also applies to other “plant” regulatory signals, such as “plant” terminators. The promoters upstream of the nucleotide sequences useful in the methods of the present invention can be modified by one or more nucleotide substitution(s), insertion(s) and/or deletion(s) without interfering with the functionality or activity of either the promoters, the open reading frame (ORF) or the 3′-regulatory region such as terminators or other 3′ regulatory regions which are located away from the ORF. It is furthermore possible that the activity of the promoters is increased by modification of their sequence, or that they are replaced completely by more active promoters, even promoters from heterologous organisms. For expression in plants, the nucleic acid molecule must, as described above, be linked operably to or comprise a suitable promoter which expresses the gene at the right NCGnt in time and with the required spatial expression pattern.

[0269] For the identification of functionally equivalent promoters, the promoter strength and/or expression pattern of a candidate promoter may be analysed for example by operably linking the promoter to a reporter gene and assaying the expression level and pattern of the reporter gene in various tissues of the plant. Suitable well-known reporter genes include for example beta-glucuronidase or beta-galactosidase. The promoter activity is assayed by measuring the enzymatic activity of the beta-glucuronidase or beta-galactosidase. The promoter strength and/or expression pattern may then be compared to that of a reference promoter (such as the one used in the methods of the present invention). Alternatively, promoter strength may be assayed by quantifying mRNA levels or by comparing mRNA levels of the nucleic acid used in the methods of the present invention, with mRNA levels of housekeeping genes such as 18S rRNA, using methods known in the art, such as Northern blotting with densitometric analysis of autoradiograms, quantitative real-time PCR or RT-PCR (Heid et al., 1996 Genome Methods 6: 986-994). Generally by “weak promoter” is intended a promoter that drives expression of a coding sequence at a low level. By “low level” is intended at levels of about 1/10,000 transcripts to about 1/100,000 transcripts, to about 1/500,0000 transcripts per cell. Conversely, a “strong promoter” drives expression of a coding sequence at high level, or at about 1/10 transcripts to about 1/100 transcripts to about 1/1000 transcripts per cell. Generally, by “medium strength promoter” is intended a promoter that drives expression of a coding sequence at a lower level than a strong promoter, in particular at a level that is in all instances below that obtained when under the control of a 35S CaMV promoter.

### Operably Linked

[0270] The term “operably linked” as used herein refers to a functional linkage between the promoter sequence and the gene of interest, such that the promoter sequence is able to initiate transcription of the gene of interest.

### Constitutive Promoter

[0271] A “constitutive promoter” refers to a promoter that is transcriptionally active during most, but not necessarily all, phases of growth and development and under most environmental conditions, in at least one cell, tissue or organ. Table 2a below gives examples of constitutive promoters.

TABLE 2a
Examples of constitutive promoters

| Gene Source | Reference |
|---|---|
| Actin | McElroy et al, Plant Cell, 2: 163-171, 1990 |
| HMGP | WO 2004/070039 |
| CAMV 35S | Odell et al, Nature, 313: 810-812, 1985 |
| CaMV 19S | Nilsson et al., Physiol. Plant. 100: 456-462, 1997 |
| GOS2 | de Pater et al, Plant J Nov; 2(6): 837-44, 1992, |
| | WO 2004/065596 |
| Ubiquitin | Christensen et al, Plant Mol. Biol. 18: 675-689, 1992 |
| Rice cyclophilin | Buchholz et al, Plant Mol Biol. 25(5): 837-43, 1994 |
| Maize H3 histone | Lepetit et al, Mol. Gen. Genet. 231: 276-285, 1992 |
| Alfalfa H3 | Wu et al. Plant Mol. Biol. 11: 641-649, 1988 |
| histone | |
| Actin 2 | An et al, Plant J. 10(1); 107-121, 1996 |
| 34S FMV | Sanger et al., Plant. Mol. Biol., 14, 1990: 433-443 |
| Rubisco small | U.S. Pat. No. 4,962,028 |
| subunit | |
| OCS | Leisner (1988) Proc Natl Acad Sci USA 85(5): 2553 |
| SAD1 | Jain et al., Crop Science, 39 (6), 1999: 1696 |
| SAD2 | Jain et al., Crop Science, 39 (6), 1999: 1696 |
| nos | Shaw et al. (1984) Nucleic Acids Res. 12(20): |
| | 7831-7846 |
| V-ATPase | WO 01/14572 |
| Super promoter | WO 95/14098 |
| G-box proteins | WO 94/12015 |

### Ubiquitous Promoter

[0272] A “ubiquitous promoter” is active in substantially all tissues or cells of an organism.

### Developmentally-Regulated Promoter

[0273] A “developmentally-regulated promoter” is active during certain developmental stages or in parts of the plant that undergo developmental changes.

### Inducible Promoter

[0274] An “inducible promoter” has induced or increased transcription initiation in response to a chemical (for a review see Gatz 1997, Annu. Rev. Plant Physiol. Plant Mol. Biol., 48:89-108), environmental or physical stimulus, or may be “stress-inducible”, i.e. activated when a plant is exposed to various stress conditions, or a “pathogen-inducible” i.e. activated when a plant is exposed to exposure to various pathogens.

### Organ-Specific/Tissue-Specific Promoter

[0275] An “organ-specific” or “tissue-specific promoter” is one that is capable of preferentially initiating transcription in certain organs or tissues, such as the leaves, roots, seed tissue etc. For example, a “root-specific promoter” is a promoter that is transcriptionally active predominantly in plant roots, substantially to the exclusion of any other parts of a plant, whilst still allowing for any leaky expression in these other plant parts. Promoters able to initiate transcription in certain cells only are referred to herein as “cell-specific”.

[0276] Examples of root-specific promoters are listed in Table 2b below:

TABLE 2b
Examples of root-specific promoters

| Gene Source | Reference |
|---|---|
| RCc3 | Plant Mol Biol. 1995 January; 27(2): 237-48 |
| Arabidopsis PHT1 | Koyama et al. J Biosci Bioeng. 2005 |
| | January; 99(1): 38-42.; Mudge et al. |
| | (2002, Plant J. 31: 341) |
| Medicago phosphate | Xiao et al., 2006, Plant Biol (Stuttg). |
| transporter | 2006 July; 8(4): 439-49 |
| Arabidopsis Pyk10 | Nitz et al. (2001) Plant Sci 161(2): 337-346 |
| root-expressible genes | Tingey et al., EMBO J. 6: 1, 1987. |
| tobacco auxin- | Van der Zaal et al., Plant Mol. Biol. 16, |
| inducible gene | 983, 1991. |
| β-tubulin | Oppenheimer, et al., Gene 63: 87, 1988. |
| tobacco root- | Conkling, et al., Plant Physiol. |
| specific genes | 93: 1203, 1990. |
| B. napus G1-3b gene | U.S. Pat. No. 5,401,836 |
| SbPRP1 | Suzuki et al., Plant Mol. Biol. 21: 109-119, |
| | 1993. |
| LRX1 | Baumberger et al. 2001, Genes & Dev. 15: 1128 |
| BTG-26 Brassica | U.S. 20050044585 |
| napus | |
| LeAMT1 (tomato) | Lauter et al. (1996, PNAS 3: 8139) |
| The LeNRT1-1 | Lauter et al. (1996, PNAS 3: 8139) |
| (tomato) | |
| class I patatin | Liu et al., Plant Mol. Biol. 17 (6): 1139-1154 |
| gene (potato) | |
| KDC1 (Daucus | Downey et al. (2000, J. Biol. Chem. 275: 39420) |
| carota) | |
| TobRB7 gene | W Song (1997) PhD Thesis, North Carolina State |
| | University, Raleigh, NC USA |
| OsRAB5a (rice) | Wang et al. 2002, Plant Sci. 163: 273 |
| ALF5 (Arabidopsis) | Diener et al. (2001, Plant Cell 13: 1625) |
| NRT2; 1Np (N. | Quesada et al. (1997, Plant Mol. Biol. 34: 265) |
| plumbaginifolia) | |

[0277] A “seed-specific promoter” is transcriptionally active predominantly in seed tissue, but not necessarily exclusively in seed tissue (in cases of leaky expression). The seed-specific promoter may be active during seed development and/or during germination. The seed specific promoter may be endosperm/aleurone/embryo specific. Examples of seed-specific promoters (endosperm/aleurone/embryo specific) are shown in Table 2c to Table 2f below. Further examples of seed-specific promoters are given in Qing Qu and Takaiwa (Plant Biotechnol. J. 2, 113-125, 2004), which disclosure is incorporated by reference herein as if fully set forth.

TABLE 2c
Examples of seed-specific promoters

| Gene source | Reference |
|---|---|
| seed-specific genes | Simon et al., Plant Mol. Biol. 5: 191, 1985; |
| | Scofield et al., J. Biol. Chem. 262: 12202, 1987.; |
| | Baszczynski et al., Plant Mol. Biol. 14: 633, 1990. |
| Brazil Nut albumin | Pearson et al., Plant Mol. Biol. 18: 235-245, 1992. |
| Legumin | Ellis et al., Plant Mol. Biol. 10: 203-214, 1988. |
| glutelin (rice) | Takaiwa et al., Mol. Gen. Genet. 208: 15-22, 1986; |
| | Takaiwa et al., FEBS Letts. 221: 43-47, 1987. |
| Zein | Matzke et al Plant Mol Biol, 14(3): 323-32 1990 |
| napA | Stalberg et al, Planta 199: 515-519, 1996. |
| wheat LMW and HMW | Mol Gen Genet 216: 81-90, 1989; NAR 17: 461-2, 1989 |
| glutenin-1 | |
| wheat SPA | Albani et al, Plant Cell, 9: 171-184, 1997 |
| wheat α, β, γ-gliadins | EMBO J. 3: 1409-15, 1984 |
| barley ltr1 promoter | Diaz et al. (1995) Mol Gen Genet 248(5): 592-8 |
| barley B1, C, D, hordein | Theor Appl Gen 98: 1253-62, 1999; Plant J 4: 343-55, |
| | 1993; Mol Gen Genet 250: 750-60, 1996 |
| barley DOF | Mena et al, The Plant Journal, 116(1): 53-62, 1998 |
| blz2 | EP99106056.7 |
| synthetic promoter | Vicente-Carbajosa et al., Plant J. 13: 629-640, 1998. |
| rice prolamin NRP33 | Wu et al, Plant Cell Physiology 39(8) 885-889, 1998 |
| rice a-globulin Glb-1 | Wu et al, Plant Cell Physiology 39(8) 885-889, 1998 |
| rice OSH1 | Sato et al, Proc. Natl. Acad. Sci. USA, 93: 8117-8122, |
| | 1996 |
| rice α-globulin REB/OHP-1 | Nakase et al. Plant Mol. Biol. 33: 513-522, 1997 |
| rice ADP-glucose pyrophos- | Trans Res 6: 157-68, 1997 |
| phorylase | |
| maize ESR gene family | Plant J 12: 235-46, 1997 |
| sorghum α-kafirin | DeRose et al., Plant Mol. Biol 32: 1029-35, 1996 |
| KNOX | Postma-Haarsma et al, Plant Mol. Biol. 39: 257-71, 1999 |
| rice oleosin | Wu et al, J. Biochem. 123: 386, 1998 |
| sunflower oleosin | Cummins et al., Plant Mol. Biol. 19: 873-876, 1992 |
| PRO0117, putative rice 40S | WO 2004/070039 |
| ribosomal protein | |
| PRO0136, rice alanine | unpublished |
| aminotransferase | |
| PRO0147, trypsin inhibitor | unpublished |
| ITR1 (barley) | |
| PRO0151, rice WSI18 | WO 2004/070039 |
| PRO0175, rice RAB21 | WO 2004/070039 |
| PRO005 | WO 2004/070039 |
| PRO0095 | WO 2004/070039 |
| α-amylase (Amy32b) | Lanahan et al, Plant Cell 4: 203-211, 1992; Skriver et al, |
| | Proc Natl Acad Sci USA 88: 7266-7270, 1991 |
| cathepsin β-like gene | Cejudo et al, Plant Mol Biol 20: 849-856, 1992 |
| Barley Ltp2 | Kalla et al., Plant J. 6: 849-60, 1994 |
| Chi26 | Leah et al., Plant J. 4: 579-89, 1994 |
| Maize B-Peru | Selinger et al., Genetics 149; 1125-38, 1998 |

TABLE 2d
examples of endosperm-specific promoters

| Gene source | Reference |
|---|---|
| glutelin (rice) | Takaiwa et al. (1986) Mol Gen Genet 208: 15-22; |
| | Takaiwa et al. (1987) FEBS Letts. 221: 43-47 |
| Zein | Matzke et al., (1990) Plant Mol Biol 14(3): 323-32 |
| wheat LMW | Colot et al. (1989) Mol Gen Genet 216: 81-90, |
| and HMW | Anderson et al. (1989) NAR 17: 461-2 |
| glutenin-1 | |
| wheat SPA | Albani et al. (1997) Plant Cell 9: 171-184 |
| wheat gliadins | Rafalski et al. (1984) EMBO 3: 1409-15 |
| barley ltr1 | Diaz et al. (1995) Mol Gen Genet 248(5): 592-8 |
| promoter | |
| barley B1, C, D, | Cho et al. (1999) Theor Appl Genet 98: 1253-62; |
| hordein | Muller et al. (1993) Plant J 4: 343-55; |
| | Sorenson et al. (1996) Mol Gen Genet 250: 750-60 |
| barley DOF | Mena et al, (1998) Plant J 116(1): 53-62 |
| blz2 | Onate et al. (1999) J Biol Chem 274(14): 9175-82 |
| synthetic promoter | Vicente-Carbajosa et al. (1998) Plant J 13: 629-640 |
| rice prolamin | Wu et al, (1998) Plant Cell Physiol 39(8) 885-889 |
| NRP33 | |
| rice globulin | Wu et al. (1998) Plant Cell Physiol 39(8) 885-889 |
| Glb-1 | |
| rice globulin | Nakase et al. (1997) Plant Molec Biol 33: 513-522 |
| REB/OHP-1 | |
| rice ADP-glucose | Russell et al. (1997) Trans Res 6: 157-68 |
| pyrophosphorylase | |
| maize ESR | Opsahl-Ferstad et al. (1997) Plant J 12: 235-46 |
| gene family | |
| sorghum kafirin | DeRose et al. (1996) Plant Mol Biol 32: 1029-35 |

TABLE 2e
Examples of embryo specific promoters:

| Gene source | Reference |
|---|---|
| rice OSH1 | Sato et al, Proc. Natl. Acad. Sci. USA, 93: 8117-8122, |
| | 1996 |
| KNOX | Postma-Haarsma et al, Plant Mol. Biol. 39: 257-71, 1999 |
| PRO0151 | WO 2004/070039 |
| PRO0175 | WO 2004/070039 |
| PRO005 | WO 2004/070039 |
| PRO0095 | WO 2004/070039 |

TABLE 2f
Examples of aleurone-specific promoters:

| Gene source | Reference |
|---|---|
| α-amylase | Lanahan et al, Plant Cell 4: 203-211, 1992; |
| (Amy32b) | Skriver et al, Proc Natl Acad Sci USA 88: |
| | 7266-7270, 1991 |
| cathepsin β-like gene | Cejudo et al, Plant Mol Biol 20: 849-856, 1992 |
| Barley Ltp2 | Kalla et al., Plant J. 6: 849-60, 1994 |
| Chi26 | Leah et al., Plant J. 4: 579-89, 1994 |
| Maize B-Peru | Selinger et al., Genetics 149; 1125-38, 1998 |

[0278] A “green tissue-specific promoter” as defined herein is a promoter that is transcriptionally active predominantly in green tissue, substantially to the exclusion of any other parts of a plant, whilst still allowing for any leaky expression in these other plant parts.

[0279] Examples of green tissue-specific promoters which may be used to perform the methods of the invention are shown in Table 2g below.

TABLE 2g
Examples of green tissue-specific promoters

| Gene | Expression | Reference |
|---|---|---|
| Maize Orthophosphate | Leaf specific | Fukavama et al., Plant |
| dikinase | | Physiol. 2001 November; |
| | | 127(3): 1136-46 |
| Maize Phosphoenolpyruvate | Leaf specific | Kausch et al., Plant Mol |
| carboxylase | | Biol. 2001 January; |
| | | 45(1): 1-15 |
| Rice Phosphoenolpyruvate | Leaf specific | Liu et al., 2004 DNA |
| carboxylase | | Seq. 2004 August; |
| | | 15(4): 269-76 |
| Rice small subunit | Leaf specific | Nomura et al., Plant Mol |
| Rubisco | | Biol. 2000 September; |
| | | 44(1): 99-106 |
| rice beta expansin | Shoot specific | WO 2004/070039 |
| EXBP9 | | |
| Pigeonpea small subunit | Leaf specific | Panguluri et al., Indian |
| Rubisco | | J Exp Biol. 2005 April; |
| | | 43(4): 369-72 |
| Pea RBCS3A | Leaf specific | |

[0280] Another example of a tissue-specific promoter is a meristem-specific promoter, which is transcriptionally active predominantly in meristematic tissue, substantially to the exclusion of any other parts of a plant, whilst still allowing for any leaky expression in these other plant parts. Examples of green meristem-specific promoters which may be used to perform the methods of the invention are shown in Table 2h below.

TABLE 2h
Examples of meristem-specific promoters

| Gene source | Expression pattern | Reference |
|---|---|---|
| rice OSH1 | Shoot apical meristem, | Sato et al. (1996) |
| | from embryo globular | Proc. Natl. Acad. Sci. |
| | stage to seedling stage | USA, 93: 8117-8122 |
| Rice metallothionein | Meristem specific | BAD87835.1 |
| WAK1 & WAK 2 | Shoot and root apical | Wagner & Kohorn |
| | meristems, and in ex- | (2001) Plant Cell |
| | panding leaves and sepals | 13(2): 303-318 |

### Terminator

[0281] The term “terminator” encompasses a control sequence which is a DNA sequence at the end of a transcriptional unit which signals 3′ processing and polyadenylation of a primary transcript and termination of transcription. The terminator can be derived from the natural gene, from a variety of other plant genes, or from T-DNA. The terminator to be added may be derived from, for example, the nopaline synthase or octopine synthase genes, or alternatively from another plant gene, or less preferably from any other eukaryotic gene.

### Selectable Marker (Gene)/Reporter Gene

[0282] “Selectable marker”, “selectable marker gene” or “reporter gene” includes any gene that confers a phenotype on a cell in which it is expressed to facilitate the identification and/or selection of cells that are transfected or transformed with a nucleic acid construct of the invention. These marker genes enable the identification of a successful transfer of the nucleic acid molecules via a series of different principles. Suitable markers may be selected from markers that confer antibiotic or herbicide resistance, that introduce a new metabolic trait or that allow visual selection. Examples of selectable marker genes include genes conferring resistance to antibiotics (such as nptII that phosphorylates neomycin and kanamycin, or hpt, phosphorylating hygromycin, or genes conferring resistance to, for example, bleomycin, streptomycin, tetracyclin, chloramphenicol, ampicillin, gentamycin, geneticin (G418), spectinomycin or blasticidin), to herbicides (for example bar which provides resistance to Basta®; aroA or gox providing resistance against glyphosate, or the genes conferring resistance to, for example, imidazolinone, phosphinothricin or sulfonylurea), or genes that provide a metabolic trait (such as manA that allows plants to use mannose as sole carbon source or xylose isomerase for the utilisation of xylose, or antinutritive markers such as the resistance to 2-deoxyglucose). Expression of visual marker genes results in the formation of colour (for example β-glucuronidase, GUS or β-galactosidase with its coloured substrates, for example X-Gal), luminescence (such as the luciferin/luceferase system) or fluorescence (Green Fluorescent Protein, GFP, and derivatives thereof). This list represents only a small number of possible markers. The skilled worker is familiar with such markers. Different markers are preferred, depending on the organism and the selection method.

[0283] It is known that upon stable or transient integration of nucleic acids into plant cells, only a minority of the cells takes up the foreign DNA and, if desired, integrates it into its genome, depending on the expression vector used and the transfection technique used. To identify and select these integrants, a gene coding for a selectable marker (such as the ones described above) is usually introduced into the host cells together with the gene of interest. These markers can for example be used in mutants in which these genes are not functional by, for example, deletion by conventional methods. Furthermore, nucleic acid molecules encoding a selectable marker can be introduced into a host cell on the same vector that comprises the sequence encoding the polypeptides of the invention or used in the methods of the invention, or else in a separate vector. Cells which have been stably transfected with the introduced nucleic acid can be identified for example by selection (for example, cells which have integrated the selectable marker survive whereas the other cells die).

[0284] Since the marker genes, particularly genes for resistance to antibiotics and herbicides, are no longer required or are undesired in the transgenic host cell once the nucleic acids have been introduced successfully, the process according to the invention for introducing the nucleic acids advantageously employs techniques which enable the removal or excision of these marker genes. One such a method is what is known as co-transformation. The co-transformation method employs two vectors simultaneously for the transformation, one vector bearing the nucleic acid according to the invention and a second bearing the marker gene(s). A large proportion of transformants receives or, in the case of plants, comprises (up to 40% or more of the transformants), both vectors. In case of transformation with Agrobacteria, the transformants usually receive only a part of the vector, i.e. the sequence flanked by the T-DNA, which usually represents the expression cassette. The marker genes can subsequently be removed from the transformed plant by performing crosses. In another method, marker genes integrated into a transposon are used for the transformation together with desired nucleic acid (known as the Ac/Ds technology). The transformants can be crossed with a transposase source or the transformants are transformed with a nucleic acid construct conferring expression of a transposase, transiently or stable. In some cases (approx. 10%), the transposon jumps out of the genome of the host cell once transformation has taken place successfully and is lost. In a further number of cases, the transposon jumps to a different location. In these cases the marker gene must be eliminated by performing crosses. In microbiology, techniques were developed which make possible, or facilitate, the detection of such events. A further advantageous method relies on what is known as recombination systems; whose advantage is that elimination by crossing can be dispensed with. The best-known system of this type is what is known as the Cre/lox system. Cre1 is a recombinase that removes the sequences located between the loxP sequences. If the marker gene is integrated between the loxP sequences, it is removed once transformation has taken place successfully, by expression of the recombinase. Further recombination systems are the HIN/HIX, FLP/FRT and REP/STB system (Tribble et al., J. Biol. Chem., 275, 2000: 22255-22267; Velmurugan et al., J. Cell Biol., 149, 2000: 553-566). A site-specific integration into the plant genome of the nucleic acid sequences according to the invention is possible. Naturally, these methods can also be applied to microorganisms such as yeast, fungi or bacteria.

### Transgenic/Transgene/Recombinant

[0285] For the purposes of the invention, “transgenic”, “transgene” or “recombinant” means with regard to, for example, a nucleic acid sequence, an expression cassette, gene construct or a vector comprising the nucleic acid sequence or an organism transformed with the nucleic acid sequences, expression cassettes or vectors according to the invention, all those constructions brought about by recombinant methods in which either
[0286] (a) the nucleic acid sequences encoding proteins useful in the methods of the invention, or
[0287] (b) genetic control sequence(s) which is operably linked with the nucleic acid sequence according to the invention, for example a promoter, or
[0288] (c) a) and b)
   are not located in their natural genetic environment or have been modified by recombinant methods, it being possible for the modification to take the form of, for example, a substitution, addition, deletion, inversion or insertion of one or more nucleotide residues. The natural genetic environment is understood as meaning the natural genomic or chromosomal locus in the original plant or the presence in a genomic library. In the case of a genomic library, the natural genetic environment of the nucleic acid sequence is preferably retained, at least in part. The environment flanks the nucleic acid sequence at least on one side and has a sequence length of at least 50 bp, preferably at least 500 bp, especially preferably at least 1000 bp, most preferably at least 5000 bp. A naturally occurring expression cassette—for example the naturally occurring combination of the natural promoter of the nucleic acid sequences with the corresponding nucleic acid sequence encoding a polypeptide useful in the methods of the present invention, as defined above—becomes a transgenic expression cassette when this expression cassette is modified by non-natural, synthetic (“artificial”) methods such as, for example, mutagenic treatment. Suitable methods are described, for example, in U.S. Pat. No. 5,565,350 or WO 00/15815.

[0289] A transgenic plant for the purposes of the invention is thus understood as meaning, as above, that the nucleic acids used in the method of the invention are not present in, or originating from, the genome of said plant, or are present in the genome of said plant but not at their natural locus in the genome of said plant, it being possible for the nucleic acids to be expressed homologously or heterologously. However, as mentioned, transgenic also means that, while the nucleic acids according to the invention or used in the inventive method are at their natural position in the genome of a plant, the sequence has been modified with regard to the natural sequence, and/or that the regulatory sequences of the natural sequences have been modified. Transgenic is preferably understood as meaning the expression of the nucleic acids according to the invention at an unnatural locus in the genome, i.e. homologous or, preferably, heterologous expression of the nucleic acids takes place. Preferred transgenic plants are mentioned herein.

[0290] It shall further be noted that in the context of the present invention, the term “isolated nucleic acid” or “isolated polypeptide” may in some instances be considered as a synonym for a “recombinant nucleic acid” or a “recombinant polypeptide”, respectively and refers to a nucleic acid or polypeptide that is not located in its natural genetic environment and/or that has been modified by recombinant methods.

### Modulation

[0291] The term “modulation” means in relation to expression or gene expression, a process in which the expression level is changed by said gene expression in comparison to the control plant, the expression level may be increased or decreased. The original, unmodulated expression may be of any kind of expression of a structural RNA (rRNA, tRNA) or mRNA with subsequent translation. For the purposes of this invention, the original unmodulated expression may also be absence of any expression. The term “modulating the activity” shall mean any change of the expression of the inventive nucleic acid sequences or encoded proteins, which leads to increased yield and/or increased growth of the plants. The expression can increase from zero (absence of, or immeasurable expression) to a certain amount, or can decrease from a certain amount to immeasurable small amounts or zero.

### Expression

[0292] The term “expression” or “gene expression” means the transcription of a specific gene or specific genes or specific genetic construct. The term “expression” or “gene expression” in particular means the transcription of a gene or genes or genetic construct into structural RNA (rRNA, tRNA) or mRNA with or without subsequent translation of the latter into a protein. The process includes transcription of DNA and processing of the resulting mRNA product.

### Increased Expression/Overexpression

[0293] The term “increased expression” or “overexpression” as used herein means any form of expression that is additional to the original wild-type expression level. For the purposes of this invention, the original wild-type expression level might also be zero, i.e. absence of expression or immeasurable expression.

[0294] Methods for increasing expression of genes or gene products are well documented in the art and include, for example, overexpression driven by appropriate promoters, the use of transcription enhancers or translation enhancers. Isolated nucleic acids which serve as promoter or enhancer elements may be introduced in an appropriate position (typically upstream) of a non-heterologous form of a polynucleotide so as to upregulate expression of a nucleic acid encoding the polypeptide of interest. For example, endogenous promoters may be altered in vivo by mutation, deletion, and/or substitution (see, Kmiec, U.S. Pat. No. 5,565,350; Zarling et al., WO9322443), or isolated promoters may be introduced into a plant cell in the proper orientation and distance from a gene of the present invention so as to control the expression of the gene.

[0295] If polypeptide expression is desired, it is generally desirable to include a polyadenylation region at the 3′-end of a polynucleotide coding region. The polyadenylation region can be derived from the natural gene, from a variety of other plant genes, or from T-DNA. The 3′ end sequence to be added may be derived from, for example, the nopaline synthase or octopine synthase genes, or alternatively from another plant gene, or less preferably from any other eukaryotic gene.

[0296] An intron sequence may also be added to the 5′ untranslated region (UTR) or the coding sequence of the partial coding sequence to increase the amount of the mature message that accumulates in the cytosol. Inclusion of a spliceable intron in the transcription unit in both plant and animal expression constructs has been shown to increase gene expression at both the mRNA and protein levels up to 1000-fold (Buchman and Berg (1988) Mol. Cell biol. 8: 4395-4405; Callis et al. (1987) Genes Dev 1:1183-1200). Such intron enhancement of gene expression is typically greatest when placed near the 5′ end of the transcription unit. Use of the maize introns Adh1-S intron 1, 2, and 6, the Bronze-1 intron are known in the art. For general information see: The Maize Handbook, Chapter 116, Freeling and Walbot, Eds., Springer, N.Y. (1994).

### Decreased Expression

[0297] Reference herein to “decreased expression” or “reduction or substantial elimination” of expression is taken to mean a decrease in endogenous gene expression and/or polypeptide levels and/or polypeptide activity relative to control plants. The reduction or substantial elimination is in increasing order of preference at least 10%, 20%, 30%, 40% or 50%, 60%, 70%, 80%, 85%, 90%, or 95%, 96%, 97%, 98%, 99% or more reduced compared to that of control plants.

[0298] For the reduction or substantial elimination of expression an endogenous gene in a plant, a sufficient length of substantially contiguous nucleotides of a nucleic acid sequence is required. In order to perform gene silencing, this may be as little as 20, 19, 18, 17, 16, 15, 14, 13, 12, 11, 10 or fewer nucleotides, alternatively this may be as much as the entire gene (including the 5′ and/or 3′ UTR, either in part or in whole). The stretch of substantially contiguous nucleotides may be derived from the nucleic acid encoding the protein of interest (target gene), or from any nucleic acid capable of encoding an orthologue, paralogue or homologue of the protein of interest. Preferably, the stretch of substantially contiguous nucleotides is capable of forming hydrogen bonds with the target gene (either sense or antisense strand), more preferably, the stretch of substantially contiguous nucleotides has, in increasing order of preference, 50%, 60%, 70%, 80%, 85%, 90%, 95%, 96%, 97%, 98%, 99%, 100% sequence identity to the target gene (either sense or antisense strand). A nucleic acid sequence encoding a (functional) polypeptide is not a requirement for the various methods discussed herein for the reduction or substantial elimination of expression of an endogenous gene.

[0299] This reduction or substantial elimination of expression may be achieved using routine tools and techniques. A preferred method for the reduction or substantial elimination of endogenous gene expression is by introducing and expressing in a plant a genetic construct into which the nucleic acid (in this case a stretch of substantially contiguous nucleotides derived from the gene of interest, or from any nucleic acid capable of encoding an orthologue, paralogue or homologue of any one of the protein of interest) is cloned as an inverted repeat (in part or completely), separated by a spacer (non-coding DNA).

[0300] In such a preferred method, expression of the endogenous gene is reduced or substantially eliminated through RNA-mediated silencing using an inverted repeat of a nucleic acid or a part thereof (in this case a stretch of substantially contiguous nucleotides derived from the gene of interest, or from any nucleic acid capable of encoding an orthologue, paralogue or homologue of the protein of interest), preferably capable of forming a hairpin structure. The inverted repeat is cloned in an expression vector comprising control sequences. A non-coding DNA nucleic acid sequence (a spacer, for example a matrix attachment region fragment (MAR), an intron, a polylinker, etc.) is located between the two inverted nucleic acids forming the inverted repeat. After transcription of the inverted repeat, a chimeric RNA with a self-complementary structure is formed (partial or complete). This double-stranded RNA structure is referred to as the hairpin RNA (hpRNA). The hpRNA is processed by the plant into siRNAs that are incorporated into an RNA-induced silencing complex (RISC). The RISC further cleaves the mRNA transcripts, thereby substantially reducing the number of mRNA transcripts to be translated into polypeptides. For further general details see for example, Grierson et al. (1998) WO 98/53083; Waterhouse et al. (1999) WO 99/53050).

[0301] Performance of the methods of the invention does not rely on introducing and expressing in a plant a genetic construct into which the nucleic acid is cloned as an inverted repeat, but any one or more of several well-known “gene silencing” methods may be used to achieve the same effects.

[0302] One such method for the reduction of endogenous gene expression is RNA-mediated silencing of gene expression (downregulation). Silencing in this case is triggered in a plant by a double stranded RNA sequence (dsRNA) that is substantially similar to the target endogenous gene. This dsRNA is further processed by the plant into about 20 to about 26 nucleotides called short interfering RNAs (siRNAs). The siRNAs are incorporated into an RNA-induced silencing complex (RISC) that cleaves the mRNA transcript of the endogenous target gene, thereby substantially reducing the number of mRNA transcripts to be translated into a polypeptide. Preferably, the double stranded RNA sequence corresponds to a target gene.

[0303] Another example of an RNA silencing method involves the introduction of nucleic acid sequences or parts thereof (in this case a stretch of substantially contiguous nucleotides derived from the gene of interest, or from any nucleic acid capable of encoding an orthologue, paralogue or homologue of the protein of interest) in a sense orientation into a plant. “Sense orientation” refers to a DNA sequence that is homologous to an mRNA transcript thereof. Introduced into a plant would therefore be at least one copy of the nucleic acid sequence. The additional nucleic acid sequence will reduce expression of the endogenous gene, giving rise to a phenomenon known as co-suppression. The reduction of gene expression will be more pronounced if several additional copies of a nucleic acid sequence are introduced into the plant, as there is a positive correlation between high transcript levels and the triggering of co-suppression.

[0304] Another example of an RNA silencing method involves the use of antisense nucleic acid sequences. An “antisense” nucleic acid sequence comprises a nucleotide sequence that is complementary to a “sense” nucleic acid sequence encoding a protein, i.e. complementary to the coding strand of a double-stranded cDNA molecule or complementary to an mRNA transcript sequence. The antisense nucleic acid sequence is preferably complementary to the endogenous gene to be silenced. The complementarity may be located in the “coding region” and/or in the “non-coding region” of a gene. The term “coding region” refers to a region of the nucleotide sequence comprising codons that are translated into amino acid residues. The term “non-coding region” refers to 5′ and 3′ sequences that flank the coding region that are transcribed but not translated into amino acids (also referred to as 5′ and 3′ untranslated regions).

[0305] Antisense nucleic acid sequences can be designed according to the rules of Watson and Crick base pairing. The antisense nucleic acid sequence may be complementary to the entire nucleic acid sequence (in this case a stretch of substantially contiguous nucleotides derived from the gene of interest, or from any nucleic acid capable of encoding an orthologue, paralogue or homologue of the protein of interest), but may also be an oligonucleotide that is antisense to only a part of the nucleic acid sequence (including the mRNA 5′ and 3′ UTR). For example, the antisense oligonucleotide sequence may be complementary to the region surrounding the translation start site of an mRNA transcript encoding a polypeptide. The length of a suitable antisense oligonucleotide sequence is known in the art and may start from about 50, 45, 40, 35, 30, 25, 20, 15 or 10 nucleotides in length or less. An antisense nucleic acid sequence according to the invention may be constructed using chemical synthesis and enzymatic ligation reactions using methods known in the art. For example, an antisense nucleic acid sequence (e.g., an antisense oligonucleotide sequence) may be chemically synthesized using naturally occurring nucleotides or variously modified nucleotides designed to increase the biological stability of the molecules or to increase the physical stability of the duplex formed between the antisense and sense nucleic acid sequences, e.g., phosphorothioate derivatives and acridine substituted nucleotides may be used. Examples of modified nucleotides that may be used to generate the antisense nucleic acid sequences are well known in the art. Known nucleotide modifications include methylation, cyclization and ‘caps’ and substitution of one or more of the naturally occurring nucleotides with an analogue such as inosine. Other modifications of nucleotides are well known in the art.

[0306] The antisense nucleic acid sequence can be produced biologically using an expression vector into which a nucleic acid sequence has been subcloned in an antisense orientation (i.e., RNA transcribed from the inserted nucleic acid will be of an antisense orientation to a target nucleic acid of interest). Preferably, production of antisense nucleic acid sequences in plants occurs by means of a stably integrated nucleic acid construct comprising a promoter, an operably linked antisense oligonucleotide, and a terminator.

[0307] The nucleic acid molecules used for silencing in the methods of the invention (whether introduced into a plant or generated in situ) hybridize with or bind to mRNA transcripts and/or genomic DNA encoding a polypeptide to thereby inhibit expression of the protein, e.g., by inhibiting transcription and/or translation. The hybridization can be by conventional nucleotide complementarity to form a stable duplex, or, for example, in the case of an antisense nucleic acid sequence which binds to DNA duplexes, through specific interactions in the major groove of the double helix. Antisense nucleic acid sequences may be introduced into a plant by transformation or direct injection at a specific tissue site. Alternatively, antisense nucleic acid sequences can be modified to target selected cells and then administered systemically. For example, for systemic administration, antisense nucleic acid sequences can be modified such that they specifically bind to receptors or antigens expressed on a selected cell surface, e.g., by linking the antisense nucleic acid sequence to peptides or antibodies which bind to cell surface receptors or antigens. The antisense nucleic acid sequences can also be delivered to cells using the vectors described herein.

[0308] According to a further aspect, the antisense nucleic acid sequence is an a-anomeric nucleic acid sequence. An a-anomeric nucleic acid sequence forms specific double-stranded hybrids with complementary RNA in which, contrary to the usual b-units, the strands run parallel to each other (Gaultier et al. (1987) Nucl Ac Res 15: 6625-6641). The antisense nucleic acid sequence may also comprise a 2′-o-methylribonucleotide (Inoue et al. (1987) Nucl Ac Res 15, 6131-6148) or a chimeric RNA-DNA analogue (Inoue et al. (1987) FEBS Lett. 215, 327-330).

[0309] The reduction or substantial elimination of endogenous gene expression may also be performed using ribozymes. Ribozymes are catalytic RNA molecules with ribonuclease activity that are capable of cleaving a single-stranded nucleic acid sequence, such as an mRNA, to which they have a complementary region. Thus, ribozymes (e.g., hammerhead ribozymes (described in Haselhoff and Gerlach (1988) Nature 334, 585-591) can be used to catalytically cleave mRNA transcripts encoding a polypeptide, thereby substantially reducing the number of mRNA transcripts to be translated into a polypeptide. A ribozyme having specificity for a nucleic acid sequence can be designed (see for example: Cech et al. U.S. Pat. No. 4,987,071; and Cech et al. U.S. Pat. No. 5,116,742). Alternatively, mRNA transcripts corresponding to a nucleic acid sequence can be used to select a catalytic RNA having a specific ribonuclease activity from a pool of RNA molecules (Bartel and Szostak (1993) Science 261, 1411-1418). The use of ribozymes for gene silencing in plants is known in the art (e.g., Atkins et al. (1994) WO 94/00012; Lenne et al. (1995) WO 95/03404; Lutziger et al. (2000) WO 00/00619; Prinsen et al. (1997) WO 97/13865 and Scott et al. (1997) WO 97/38116).

[0310] Gene silencing may also be achieved by insertion mutagenesis (for example, T-DNA insertion or transposon insertion) or by strategies as described by, among others, Angell and Baulcombe ((1999) Plant J 20(3): 357-62), (Amplicon VIGS WO 98/36083), or Baulcombe (WO 99/15682).

[0311] Gene silencing may also occur if there is a mutation on an endogenous gene and/or a mutation on an isolated gene/nucleic acid subsequently introduced into a plant. The reduction or substantial elimination may be caused by a non-functional polypeptide. For example, the polypeptide may bind to various interacting proteins; one or more mutation(s) and/or truncation(s) may therefore provide for a polypeptide that is still able to bind interacting proteins (such as receptor proteins) but that cannot exhibit its normal function (such as signalling ligand).

[0312] A further approach to gene silencing is by targeting nucleic acid sequences complementary to the regulatory region of the gene (e.g., the promoter and/or enhancers) to form triple helical structures that prevent transcription of the gene in target cells. See Helene, C., Anticancer Drug Res. 6, 569-84, 1991; Helene et al., Ann. N.Y. Acad. Sci. 660, 27-36 1992; and Maher, L. J. Bioassays 14, 807-15, 1992.

[0313] Other methods, such as the use of antibodies directed to an endogenous polypeptide for inhibiting its function in planta, or interference in the signalling pathway in which a polypeptide is involved, will be well known to the skilled man. In particular, it can be envisaged that manmade molecules may be useful for inhibiting the biological function of a target polypeptide, or for interfering with the signalling pathway in which the target polypeptide is involved.

[0314] Alternatively, a screening program may be set up to identify in a plant population natural variants of a gene, which variants encode polypeptides with reduced activity. Such natural variants may also be used for example, to perform homologous recombination.

[0315] Artificial and/or natural microRNAs (miRNAs) may be used to knock out gene expression and/or mRNA translation. Endogenous miRNAs are single stranded small RNAs of typically 19-24 nucleotides long. They function primarily to regulate gene expression and/or mRNA translation. Most plant microRNAs (miRNAs) have perfect or near-perfect complementarity with their target sequences. However, there are natural targets with up to five mismatches. They are processed from longer non-coding RNAs with characteristic fold-back structures by double-strand specific RNases of the Dicer family. Upon processing, they are incorporated in the RNA-induced silencing complex (RISC) by binding to its main component, an Argonaute protein. MiRNAs serve as the specificity components of RISC, since they base-pair to target nucleic acids, mostly mRNAs, in the cytoplasm. Subsequent regulatory events include target mRNA cleavage and destruction and/or translational inhibition. Effects of miRNA overexpression are thus often reflected in decreased mRNA levels of target genes.

[0316] Artificial microRNAs (amiRNAs), which are typically 21 nucleotides in length, can be genetically engineered specifically to negatively regulate gene expression of single or multiple genes of interest. Determinants of plant microRNA target selection are well known in the art. Empirical parameters for target recognition have been defined and can be used to aid in the design of specific amiRNAs, (Schwab et al., Dev. Cell 8, 517-527, 2005). Convenient tools for design and generation of amiRNAs and their precursors are also available to the public (Schwab et al., Plant Cell 18, 1121-1133, 2006).

[0317] For optimal performance, the gene silencing techniques used for reducing expression in a plant of an endogenous gene requires the use of nucleic acid sequences from monocotyledonous plants for transformation of monocotyledonous plants, and from dicotyledonous plants for transformation of dicotyledonous plants. Preferably, a nucleic acid sequence from any given plant species is introduced into that same species. For example, a nucleic acid sequence from rice is transformed into a rice plant. However, it is not an absolute requirement that the nucleic acid sequence to be introduced originates from the same plant species as the plant in which it will be introduced. It is sufficient that there is substantial homology between the endogenous target gene and the nucleic acid to be introduced.

[0318] Described above are examples of various methods for the reduction or substantial elimination of expression in a plant of an endogenous gene. A person skilled in the art would readily be able to adapt the aforementioned methods for silencing so as to achieve reduction of expression of an endogenous gene in a whole plant or in parts thereof through the use of an appropriate promoter, for example.

### Transformation

[0319] The term “introduction” or “transformation” as referred to herein encompasses the transfer of an exogenous polynucleotide into a host cell, irrespective of the method used for transfer. Plant tissue capable of subsequent clonal propagation, whether by organogenesis or embryogenesis, may be transformed with a genetic construct of the present invention and a whole plant regenerated there from. The particular tissue chosen will vary depending on the clonal propagation systems available for, and best suited to, the particular species being transformed. Exemplary tissue targets include leaf disks, pollen, embryos, cotyledons, hypocotyls, megagametophytes, callus tissue, existing meristematic tissue (e.g., apical meristem, axillary buds, and root meristems), and induced meristem tissue (e.g., cotyledon meristem and hypocotyl meristem). The polynucleotide may be transiently or stably introduced into a host cell and may be maintained non-integrated, for example, as a plasmid. Alternatively, it may be integrated into the host genome. The resulting transformed plant cell may then be used to regenerate a transformed plant in a manner known to persons skilled in the art. Alternatively, a plant cell that cannot be regenerated into a plant may be chosen as host cell, i.e. the resulting transformed plant cell does not have the capacity to regenerate into a (whole) plant.

[0320] The transfer of foreign genes into the genome of a plant is called transformation. Transformation of plant species is now a fairly routine technique. Advantageously, any of several transformation methods may be used to introduce the gene of interest into a suitable ancestor cell. The methods described for the transformation and regeneration of plants from plant tissues or plant cells may be utilized for transient or for stable transformation. Transformation methods include the use of liposomes, electroporation, chemicals that increase free DNA uptake, injection of the DNA directly into the plant, particle gun bombardment, transformation using viruses or pollen and microprojection. Methods may be selected from the calcium/polyethylene glycol method for protoplasts (Krens, F. A. et al., (1982) Nature 296, 72-74; Negrutiu I et al. (1987) Plant Mol Biol 8: 363-373); electroporation of protoplasts (Shillito R. D. et al. (1985) Bio/Technol 3, 1099-1102); microinjection into plant material (Crossway A et al., (1986) Mol. Gen Genet 202: 179-185); DNA or RNA-coated particle bombardment (Klein T M et al., (1987) Nature 327: 70) infection with (non-integrative) viruses and the like. Transgenic plants, including transgenic crop plants, are preferably produced via Agrobacterium-mediated transformation. An advantageous transformation method is the transformation in planta. To this end, it is possible, for example, to allow the agrobacteria to act on plant seeds or to inoculate the plant meristem with agrobacteria. It has proved particularly expedient in accordance with the invention to allow a suspension of transformed agrobacteria to act on the intact plant or at least on the flower primordia. The plant is subsequently grown on until the seeds of the treated plant are obtained (Clough and Bent, Plant J. (1998) 16, 735-743). Methods for Agrobacterium-mediated transformation of rice include well known methods for rice transformation, such as those described in any of the following: European patent application EP 1198985 A1, Aldemita and Hodges (Planta 199: 612-617, 1996); Chan et al. (Plant Mol Biol 22 (3): 491-506, 1993), Hiei et al. (Plant J 6 (2): 271-282, 1994), which disclosures are incorporated by reference herein as if fully set forth. In the case of corn transformation, the preferred method is as described in either Ishida et al. (Nat. Biotechnol 14(6): 745-50, 1996) or Frame et al. (Plant Physiol 129(1): 13-22, 2002), which disclosures are incorporated by reference herein as if fully set forth. Said methods are further described by way of example in B. Jenes et al., Techniques for Gene Transfer, in: Transgenic Plants, Vol. 1, Engineering and Utilization, eds. S. D. Kung and R. Wu, Academic Press (1993) 128-143 and in Potrykus Annu. Rev. Plant Physiol. Plant Molec. Biol. 42 (1991) 205-225). The nucleic acids or the construct to be expressed is preferably cloned into a vector, which is suitable for transforming Agrobacterium tumefaciens, for example pBin19 (Bevan et al., Nucl. Acids Res. 12 (1984) 8711). Agrobacteria transformed by such a vector can then be used in known manner for the transformation of plants, such as plants used as a model, like Arabidopsis (Arabidopsis thaliana is within the scope of the present invention not considered as a crop plant), or crop plants such as, by way of example, tobacco plants, for example by immersing bruised leaves or chopped leaves in an agrobacterial solution and then culturing them in suitable media. The transformation of plants by means of Agrobacterium tumefaciens is described, for example, by Hofgen and Willmitzer in Nucl. Acid Res. (1988) 16, 9877 or is known inter alia from F. F. White, Vectors for Gene Transfer in Higher Plants; in Transgenic Plants, Vol. 1, Engineering and Utilization, eds. S. D. Kung and R. Wu, Academic Press, 1993, pp. 15-38.

[0321] In addition to the transformation of somatic cells, which then have to be regenerated into intact plants, it is also possible to transform the cells of plant meristems and in particular those cells which develop into gametes. In this case, the transformed gametes follow the natural plant development, giving rise to transgenic plants. Thus, for example, seeds of Arabidopsis are treated with agrobacteria and seeds are obtained from the developing plants of which a certain proportion is transformed and thus transgenic [Feldman, K A and Marks M D (1987). Mol Gen Genet 208:1-9; Feldmann K (1992). In: C Koncz, N-H Chua and J Shell, eds, Methods in Arabidopsis Research. Word Scientific, Singapore, pp. 274-289]. Alternative methods are based on the repeated removal of the inflorescences and incubation of the excision site in the center of the rosette with transformed agrobacteria, whereby transformed seeds can likewise be obtained at a later NCGnt in time (Chang (1994). Plant J. 5: 551-558; Katavic (1994). Mol Gen Genet, 245: 363-370). However, an especially effective method is the vacuum infiltration method with its modifications such as the “floral dip” method. In the case of vacuum infiltration of Arabidopsis, intact plants under reduced pressure are treated with an agrobacterial suspension [Bechthold, N (1993). C R Acad Sci Paris Life Sci, 316: 1194-1199], while in the case of the “floral dip” method the developing floral tissue is incubated briefly with a surfactant-treated agrobacterial suspension [Clough, S J and Bent A F (1998) The Plant J. 16, 735-743]. A certain proportion of transgenic seeds are harvested in both cases, and these seeds can be distinguished from non-transgenic seeds by growing under the above-described selective conditions. In addition the stable transformation of plastids is of advantages because plastids are inherited maternally is most crops reducing or eliminating the risk of transgene flow through pollen. The transformation of the chloroplast genome is generally achieved by a process which has been schematically displayed in Klaus et al., 2004 [Nature Biotechnology 22 (2), 225-229]. Briefly the sequences to be transformed are cloned together with a selectable marker gene between flanking sequences homologous to the chloroplast genome. These homologous flanking sequences direct site specific integration into the plastome. Plastidal transformation has been described for many different plant species and an overview is given in Bock (2001) Transgenic plastids in basic research and plant biotechnology. J Mol Biol. 2001 Sep. 21; 312 (3):425-38 or Maliga, P (2003) Progress towards commercialization of plastid transformation technology. Trends Biotechnol. 21, 20-28. Further biotechnological progress has recently been reported in form of marker free plastid transformants, which can be produced by a transient co-integrated maker gene (Klaus et al., 2004, Nature Biotechnology 22(2), 225-229).

[0322] The genetically modified plant cells can be regenerated via all methods with which the skilled worker is familiar. Suitable methods can be found in the abovementioned publications by S. D. Kung and R. Wu, Potrykus or Hofgen and Willmitzer. Alternatively, the genetically modified plant cells are non-regenerable into a whole plant.

[0323] Generally after transformation, plant cells or cell groupings are selected for the presence of one or more markers which are encoded by plant-expressible genes co-transferred with the gene of interest, following which the transformed material is regenerated into a whole plant. To select transformed plants, the plant material obtained in the transformation is, as a rule, subjected to selective conditions so that transformed plants can be distinguished from untransformed plants. For example, the seeds obtained in the above-described manner can be planted and, after an initial growing period, subjected to a suitable selection by spraying. A further possibility consists in growing the seeds, if appropriate after sterilization, on agar plates using a suitable selection agent so that only the transformed seeds can grow into plants. Alternatively, the transformed plants are screened for the presence of a selectable marker such as the ones described above.

[0324] Following DNA transfer and regeneration, putatively transformed plants may also be evaluated, for instance using Southern analysis, for the presence of the gene of interest, copy number and/or genomic organisation. Alternatively or additionally, expression levels of the newly introduced DNA may be monitored using Northern and/or Western analysis, both techniques being well known to persons having ordinary skill in the art.

[0325] The generated transformed plants may be propagated by a variety of means, such as by clonal propagation or classical breeding techniques. For example, a first generation (or T1) transformed plant may be selfed and homozygous second-generation (or T2) transformants selected, and the T2 plants may then further be propagated through classical breeding techniques. The generated transformed organisms may take a variety of forms. For example, they may be chimeras of transformed cells and non-transformed cells; clonal transformants (e.g., all cells transformed to contain the expression cassette); grafts of transformed and untransformed tissues (e.g., in plants, a transformed rootstock grafted to an untransformed scion).

### T-DNA Activation Tagging

[0326] “T-DNA activation” tagging (Hayashi et al. Science (1992) 1350-1353), involves insertion of T-DNA, usually containing a promoter (may also be a translation enhancer or an intron), in the genomic region of the gene of interest or 10 kb up- or downstream of the coding region of a gene in a configuration such that the promoter directs expression of the targeted gene. Typically, regulation of expression of the targeted gene by its natural promoter is disrupted and the gene falls under the control of the newly introduced promoter. The promoter is typically embedded in a T-DNA. This T-DNA is randomly inserted into the plant genome, for example, through Agrobacterium infection and leads to modified expression of genes near the inserted T-DNA. The resulting transgenic plants show dominant phenotypes due to modified expression of genes close to the introduced promoter.

### TILLING

[0327] The term “TILLING” is an abbreviation of “Targeted Induced Local Lesions In Genomes” and refers to a mutagenesis technology useful to generate and/or identify nucleic acids encoding proteins with modified expression and/or activity. TILLING also allows selection of plants carrying such mutant variants. These mutant variants may exhibit modified expression, either in strength or in location or in timing (if the mutations affect the promoter for example). These mutant variants may exhibit higher activity than that exhibited by the gene in its natural form. TILLING combines high-density mutagenesis with high-throughput screening methods. The steps typically followed in TILLING are: (a) EMS mutagenesis (Redei G P and Koncz C (1992) In Methods in Arabidopsis Research, Koncz C, Chua N H, Schell J, eds. Singapore, World Scientific Publishing Co, pp. 16-82; Feldmann et al., (1994) In Meyerowitz E M, Somerville C R, eds, Arabidopsis. Cold Spring Harbor Laboratory Press, Cold Spring Harbor, N.Y., pp 137-172; Lightner J and Caspar T (1998) In J Martinez-Zapater, J Salinas, eds, Methods on Molecular Biology, Vol. 82. Humana Press, Totowa, N.J., pp 91-104); (b) DNA preparation and pooling of individuals; (c) PCR amplification of a region of interest; (d) denaturation and annealing to allow formation of heteroduplexes; (e) DHPLC, where the presence of a heteroduplex in a pool is detected as an extra peak in the chromatogram; (f) identification of the mutant individual; and (g) sequencing of the mutant PCR product. Methods for TILLING are well known in the art (McCallum et al., (2000) Nat Biotechnol 18: 455-457; reviewed by Stemple (2004) Nat Rev Genet 5(2): 145-50).

### Homologous Recombination

[0328] “Homologous recombination” allows introduction in a genome of a selected nucleic acid at a defined selected position. Homologous recombination is a standard technology used routinely in biological sciences for lower organisms such as yeast or the moss Physcomitrella. Methods for performing homologous recombination in plants have been described not only for model plants (Offringa et al. (1990) EMBO J 9(10): 3077-84) but also for crop plants, for example rice (Terada et al. (2002) Nat Biotech 20(10): 1030-4; lida and Terada (2004) Curr Opin Biotech 15(2): 132-8), and approaches exist that are generally applicable regardless of the target organism (Miller et al, Nature Biotechnol. 25, 778-785, 2007).

### Yield Related Trait(s)

[0329] A “Yield related trait” is a trait or feature which is related to plant yield. Yield-related traits may comprise one or more of the following non-limitative list of features: early flowering time, yield, biomass, seed yield, early vigour, greenness index, growth rate, agronomic traits, such as e.g. tolerance to submergence (which leads to yield in rice), Water Use Efficiency (WUE), Nitrogen Use Efficiency (NUE), etc.

[0330] Reference herein to enhanced yield-related traits, relative to of control plants is taken to mean one or more of an increase in early vigour and/or in biomass (weight) of one or more parts of a plant, which may include (i) aboveground parts and preferably aboveground harvestable parts and/or (ii) parts below ground and preferably harvestable below ground. In particular, such harvestable parts are seeds.

### Yield

[0331] The term “yield” in general means a measurable produce of economic value, typically related to a specified crop, to an area, and to a period of time. Individual plant parts directly contribute to yield based on their number, size and/or weight, or the actual yield is the yield per square meter for a crop and year, which is determined by dividing total production (includes both harvested and appraised production) by planted square meters.

[0332] The terms “yield” of a plant and “plant yield” are used interchangeably herein and are meant to refer to vegetative biomass such as root and/or shoot biomass, to reproductive organs, and/or to propagules such as seeds of that plant.

[0333] Flowers in maize are unisexual; male inflorescences (tassels) originate from the apical stem and female inflorescences (ears) arise from axillary bud apices. The female inflorescence produces pairs of spikelets on the surface of a central axis (cob). Each of the female spikelets encloses two fertile florets, one of them will usually mature into a maize kernel once fertilized. Hence a yield increase in maize may be manifested as one or more of the following: increase in the number of plants established per square meter, an increase in the number of ears per plant, an increase in the number of rows, number of kernels per row, kernel weight, thousand kernel weight, ear length/diameter, increase in the seed filling rate, which is the number of filled florets (i.e. florets containing seed) divided by the total number of florets and multiplied by 100), among others.

[0334] Inflorescences in rice plants are named panicles. The panicle bears spikelets, which are the basic units of the panicles, and which consist of a pedicel and a floret. The floret is borne on the pedicel and includes a flower that is covered by two protective glumes: a larger glume (the lemma) and a shorter glume (the palea). Hence, taking rice as an example, a yield increase may manifest itself as an increase in one or more of the following: number of plants per square meter, number of panicles per plant, panicle length, number of spikelets per panicle, number of flowers (or florets) per panicle; an increase in the seed filling rate which is the number of filled florets (i.e. florets containing seeds) divided by the total number of florets and multiplied by 100; an increase in thousand kernel weight, among others.

### Early Flowering Time

[0335] Plants having an “early flowering time” as used herein are plants which start to flower earlier than control plants. Hence this term refers to plants that show an earlier start of flowering. Flowering time of plants can be assessed by counting the number of days (“time to flower”) between sowing and the emergence of a first inflorescence. The “flowering time” of a plant can for instance be determined using the method as described in WO 2007/093444.

### Early Vigour

[0336] “Early vigour” refers to active healthy well-balanced growth especially during early stages of plant growth, and may result from increased plant fitness due to, for example, the plants being better adapted to their environment (i.e. optimizing the use of energy resources and partitioning between shoot and root). Plants having early vigour also show increased seedling survival and a better establishment of the crop, which often results in highly uniform fields (with the crop growing in uniform manner, i.e. with the majority of plants reaching the various stages of development at substantially the same time), and often better and higher yield. Therefore, early vigour may be determined by measuring various factors, such as thousand kernel weight, percentage germination, percentage emergence, seedling growth, seedling height, root length, root and shoot biomass and many more.

### Increased Growth Rate

[0337] The increased growth rate may be specific to one or more parts of a plant (including seeds), or may be throughout substantially the whole plant. Plants having an increased growth rate may have a shorter life cycle. The life cycle of a plant may be taken to mean the time needed to grow from a mature seed up to the stage where the plant has produced mature seeds, similar to the starting material. This life cycle may be influenced by factors such as speed of germination, early vigour, growth rate, greenness index, flowering time and speed of seed maturation. The increase in growth rate may take place at one or more stages in the life cycle of a plant or during substantially the whole plant life cycle. Increased growth rate during the early stages in the life cycle of a plant may reflect enhanced vigour. The increase in growth rate may alter the harvest cycle of a plant allowing plants to be sown later and/or harvested sooner than would otherwise be possible (a similar effect may be obtained with earlier flowering time). If the growth rate is sufficiently increased, it may allow for the further sowing of seeds of the same plant species (for example sowing and harvesting of rice plants followed by sowing and harvesting of further rice plants all within one conventional growing period). Similarly, if the growth rate is sufficiently increased, it may allow for the further sowing of seeds of different plants species (for example the sowing and harvesting of corn plants followed by, for example, the sowing and optional harvesting of soybean, potato or any other suitable plant). Harvesting additional times from the same rootstock in the case of some crop plants may also be possible. Altering the harvest cycle of a plant may lead to an increase in annual biomass production per square meter (due to an increase in the number of times (say in a year) that any particular plant may be grown and harvested). An increase in growth rate may also allow for the cultivation of transgenic plants in a wider geographical area than their wild-type counterparts, since the territorial limitations for growing a crop are often determined by adverse environmental conditions either at the time of planting (early season) or at the time of harvesting (late season). Such adverse conditions may be avoided if the harvest cycle is shortened. The growth rate may be determined by deriving various parameters from growth curves, such parameters may be: T-Mid (the time taken for plants to reach 50% of their maximal size) and T-90 (time taken for plants to reach 90% of their maximal size), amongst others.

### Stress Resistance

[0338] An increase in yield and/or growth rate occurs whether the plant is under non-stress conditions or whether the plant is exposed to various stresses compared to control plants. Plants typically respond to exposure to stress by growing more slowly. In conditions of severe stress, the plant may even stop growing altogether. Mild stress on the other hand is defined herein as being any stress to which a plant is exposed which does not result in the plant ceasing to grow altogether without the capacity to resume growth. Mild stress in the sense of the invention leads to a reduction in the growth of the stressed plants of less than 40%, 35%, 30% or 25%, more preferably less than 20% or 15% in comparison to the control plant under non-stress conditions. Due to advances in agricultural practices (irrigation, fertilization, pesticide treatments) severe stresses are not often encountered in cultivated crop plants. As a consequence, the compromised growth induced by mild stress is often an undesirable feature for agriculture. Abiotic stresses may be due to drought or excess water, anaerobic stress, salt stress, chemical toxicity, oxidative stress and hot, cold or freezing temperatures.

[0339] “Biotic stresses” are typically those stresses caused by pathogens, such as bacteria, viruses, fungi, nematodes and insects.

[0340] The “abiotic stress” may be an osmotic stress caused by a water stress, e.g. due to drought, salt stress, or freezing stress. Abiotic stress may also be an oxidative stress or a cold stress. “Freezing stress” is intended to refer to stress due to freezing temperatures, i.e. temperatures at which available water molecules freeze and turn into ice. “Cold stress”, also called “chilling stress”, is intended to refer to cold temperatures, e.g. temperatures below 10°, or preferably below 5° C., but at which water molecules do not freeze. As reported in Wang et al. (Planta (2003) 218: 1-14), abiotic stress leads to a series of morphological, physiological, biochemical and molecular changes that adversely affect plant growth and productivity. Drought, salinity, extreme temperatures and oxidative stress are known to be interconnected and may induce growth and cellular damage through similar mechanisms. Rabbani et al. (Plant Physiol (2003) 133: 1755-1767) describes a particularly high degree of “cross talk” between drought stress and high-salinity stress. For example, drought and/or salinisation are manifested primarily as osmotic stress, resulting in the disruption of homeostasis and ion distribution in the cell. Oxidative stress, which frequently accompanies high or low temperature, salinity or drought stress, may cause denaturing of functional and structural proteins. As a consequence, these diverse environmental stresses often activate similar cell signalling pathways and cellular responses, such as the production of stress proteins, up-regulation of anti-oxidants, accumulation of compatible solutes and growth arrest. The term “non-stress” conditions as used herein are those environmental conditions that allow optimal growth of plants. Persons skilled in the art are aware of normal soil conditions and climatic conditions for a given location. Plants with optimal growth conditions, (grown under non-stress conditions) typically yield in increasing order of preference at least 97%, 95%, 92%, 90%, 87%, 85%, 83%, 80%, 77% or 75% of the average production of such plant in a given environment. Average production may be calculated on harvest and/or season basis. Persons skilled in the art are aware of average yield productions of a crop.

[0341] In particular, the methods of the present invention may be performed under non-stress conditions. In an example, the methods of the present invention may be performed under non-stress conditions such as mild drought to give plants having increased yield relative to control plants.

[0342] In another embodiment, the methods of the present invention may be performed under stress conditions.

[0343] In an example, the methods of the present invention may be performed under stress conditions such as drought to give plants having increased yield relative to control plants. In another example, the methods of the present invention may be performed under stress conditions such as nutrient deficiency to give plants having increased yield relative to control plants.

[0344] Nutrient deficiency may result from a lack of nutrients such as nitrogen, phosphates and other phosphorous-containing compounds, potassium, calcium, magnesium, manganese, iron and boron, amongst others.

[0345] In yet another example, the methods of the present invention may be performed under stress conditions such as salt stress to give plants having increased yield relative to control plants. The term salt stress is not restricted to common salt (NaCl), but may be any one or more of: NaCl, KCl, LiCl, MgCl₂, CaCl₂, amongst others.

[0346] In yet another example, the methods of the present invention may be performed under stress conditions such as cold stress or freezing stress to give plants having increased yield relative to control plants.

### Increase/Improve/Enhance

[0347] The terms “increase”, “improve” or “enhance” are interchangeable and shall mean in the sense of the application at least a 3%, 4%, 5%, 6%, 7%, 8%, 9% or 10%, preferably at least 15% or 20%, more preferably 25%, 30%, 35% or 40% more yield and/or growth in comparison to control plants as defined herein.

### Seed Yield

[0348] Increased seed yield may manifest itself as one or more of the following:
[0349] a) an increase in seed biomass (total seed weight) which may be on an individual seed basis and/or per plant and/or per square meter;
[0350] b) increased number of flowers per plant;
[0351] c) increased number of seeds;
[0352] d) increased seed filling rate (which is expressed as the ratio between the number of filled florets divided by the total number of florets);
[0353] e) increased harvest index, which is expressed as a ratio of the yield of harvestable parts, such as seeds, divided by the biomass of aboveground plant parts; and
[0354] f) increased thousand kernel weight (TKW), which is extrapolated from the number of seeds counted and their total weight. An increased TKW may result from an increased seed size and/or seed weight, and may also result from an increase in embryo and/or endosperm size.

[0355] The terms “filled florets” and “filled seeds” may be considered synonyms.

[0356] An increase in seed yield may also be manifested as an increase in seed size and/or seed volume. Furthermore, an increase in seed yield may also manifest itself as an increase in seed area and/or seed length and/or seed width and/or seed perimeter.

### Greenness Index

[0357] The “greenness index” as used herein is calculated from digital images of plants. For each pixel belonging to the plant object on the image, the ratio of the green value versus the red value (in the RGB model for encoding color) is calculated. The greenness index is expressed as the percentage of pixels for which the green-to-red ratio exceeds a given threshold. Under normal growth conditions, under salt stress growth conditions, and under reduced nutrient availability growth conditions, the greenness index of plants is measured in the last imaging before flowering. In contrast, under drought stress growth conditions, the greenness index of plants is measured in the first imaging after drought.

### Biomass

[0358] The term “biomass” as used herein is intended to refer to the total weight of a plant. Within the definition of biomass, a distinction may be made between the biomass of one or more parts of a plant, which may include any one or more of the following:
[0359] aboveground parts such as but not limited to shoot biomass, seed biomass, leaf biomass, etc.;
[0360] aboveground harvestable parts such as but not limited to shoot biomass, seed biomass, leaf biomass, etc.;
[0361] parts below ground, such as but not limited to root biomass, tubers, bulbs, etc.;
[0362] harvestable parts below ground, such as but not limited to root biomass, tubers, bulbs, etc.;
[0363] harvestable parts partially below ground such as but not limited to beets and other hypocotyl areas of a plant, rhizomes, stolons or creeping rootstalks;
[0364] vegetative biomass such as root biomass, shoot biomass, etc.;
[0365] reproductive organs; and
[0366] propagules such as seed.

### Marker Assisted Breeding

[0367] Such breeding programmes sometimes require introduction of allelic variation by mutagenic treatment of the plants, using for example EMS mutagenesis; alternatively, the programme may start with a collection of allelic variants of so called “natural” origin caused unintentionally. Identification of allelic variants then takes place, for example, by PCR. This is followed by a step for selection of superior allelic variants of the sequence in question and which give increased yield. Selection is typically carried out by monitoring growth performance of plants containing different allelic variants of the sequence in question. Growth performance may be monitored in a greenhouse or in the field. Further optional steps include crossing plants in which the superior allelic variant was identified with another plant. This could be used, for example, to make a combination of interesting phenotypic features.

### Use as Probes in (Gene Mapping)

[0368] Use of nucleic acids encoding the protein of interest for genetically and physically mapping the genes requires only a nucleic acid sequence of at least 15 nucleotides in length. These nucleic acids may be used as restriction fragment length polymorphism (RFLP) markers. Southern blots (Sambrook J, Fritsch E F and Maniatis T (1989) Molecular Cloning, A Laboratory Manual) of restriction-digested plant genomic DNA may be probed with the nucleic acids encoding the protein of interest. The resulting banding patterns may then be subjected to genetic analyses using computer programs such as MapMaker (Lander et al. (1987) Genomics 1: 174-181) in order to construct a genetic map. In addition, the nucleic acids may be used to probe Southern blots containing restriction endonuclease-treated genomic DNAs of a set of individuals representing parent and progeny of a defined genetic cross. Segregation of the DNA polymorphisms is noted and used to calculate the position of the nucleic acid encoding the protein of interest in the genetic map previously obtained using this population (Botstein et al. (1980) Am. J. Hum. Genet. 32:314-331).

[0369] The production and use of plant gene-derived probes for use in genetic mapping is described in Bernatzky and Tanksley (1986) Plant Mol. Biol. Reporter 4: 37-41. Numerous publications describe genetic mapping of specific cDNA clones using the methodology outlined above or variations thereof. For example, F2 intercross populations, backcross populations, randomly mated populations, near isogenic lines, and other sets of individuals may be used for mapping. Such methodologies are well known to those skilled in the art.

[0370] The nucleic acid probes may also be used for physical mapping (i.e., placement of sequences on physical maps; see Hoheisel et al. In: Non-mammalian Genomic Analysis: A Practical Guide, Academic press 1996, pp. 319-346, and references cited therein).

[0371] In another embodiment, the nucleic acid probes may be used in direct fluorescence in situ hybridisation (FISH) mapping (Trask (1991) Trends Genet. 7:149-154). Although current methods of FISH mapping favour use of large clones (several kb to several hundred kb; see Laan et al. (1995) Genome Res. 5:13-20), improvements in sensitivity may allow performance of FISH mapping using shorter probes.

[0372] A variety of nucleic acid amplification-based methods for genetic and physical mapping may be carried out using the nucleic acids. Examples include allele-specific amplification (Kazazian (1989) J. Lab. Clin. Med 11:95-96), polymorphism of PCR-amplified fragments (CAPS; Sheffield et al. (1993) Genomics 16:325-332), allele-specific ligation (Landegren et al. (1988) Science 241:1077-1080), nucleotide extension reactions (Sokolov (1990) Nucleic Acid Res. 18:3671), Radiation Hybrid Mapping (Walter et al. (1997) Nat. Genet. 7:22-28) and Happy Mapping (Dear and Cook (1989) Nucleic Acid Res. 17:6795-6807). For these methods, the sequence of a nucleic acid is used to design and produce primer pairs for use in the amplification reaction or in primer extension reactions. The design of such primers is well known to those skilled in the art. In methods employing PCR-based genetic mapping, it may be necessary to identify DNA sequence differences between the parents of the mapping cross in the region corresponding to the instant nucleic acid sequence. This, however, is generally not necessary for mapping methods.

### Plant

[0373] The term “plant” as used herein encompasses whole plants, ancestors and progeny of the plants and plant parts, including seeds, shoots, stems, leaves, roots (including tubers), flowers, and tissues and organs, wherein each of the aforementioned comprise the gene/nucleic acid of interest. The term “plant” also encompasses plant cells, suspension cultures, callus tissue, embryos, meristematic regions, gametophytes, sporophytes, pollen and microspores, again wherein each of the aforementioned comprises the gene/nucleic acid of interest.

[0374] Plants that are particularly useful in the methods of the invention include all plants which belong to the superfamily Viridiplantae, in particular monocotyledonous and dicotyledonous plants including fodder or forage legumes, ornamental plants, food crops, trees or shrubs selected from the list comprising Acer spp., Actinidia spp., Abelmoschus spp., Agave sisalana, Agropyron spp., Agrostis stolonifera, Allium spp., Amaranthus spp., Ammophila arenaria, Ananas comosus, Annona spp., Apium graveolens, Arachis spp, Artocarpus spp., Asparagus officinalis, Avena spp. (e.g. Avena sativa, Avena fatua, Avena byzantina, Avena fatua var. sativa, Avena hybrida), Averrhoa carambola, Bambusa sp., Benincasa hispida, Bertholletia excelsea, Beta vulgaris, Brassica spp. (e.g. Brassica napus, Brassica rapa ssp. [canola, oilseed rape, turnip rape]), Cadaba farinosa, Camellia sinensis, Canna indica, Cannabis sativa, Capsicum spp., Carex elata, Carica papaya, Carissa macrocarpa, Carya spp., Carthamus tinctorius, Castanea spp., Ceiba pentandra, Cichorium endivia, Cinnamomum spp., Citrullus lanatus, Citrus spp., Cocos spp., Coffea spp., Colocasia esculenta, Cola spp., Corchorus sp., Coriandrum sativum, Corylus spp., Crataegus spp., Crocus sativus, Cucurbita spp., Cucumis spp., Cynara spp., Daucus carota, Desmodium spp., Dimocarpus longan, Dioscorea spp., Diospyros spp., Echinochloa spp., Elaeis (e.g. Elaeis guineensis, Elaeis oleifera), Eleusine coracana, Eragrostis tef, Erianthus sp., Eriobotrya japonica, Eucalyptus sp., Eugenia uniflora, Fagopyrum spp., Fagus spp., Festuca arundinacea, Ficus carica, Fortunella spp., Fragaria spp., Ginkgo biloba, Glycine spp. (e.g. Glycine max, Soja hispida or Soja max), Gossypium hirsutum, Helianthus spp. (e.g. Helianthus annuus), Hemerocallis fulva, Hibiscus spp., Hordeum spp. (e.g. Hordeum vulgare), Ipomoea batatas, Juglans spp., Lactuca sativa, Lathyrus spp., Lens culinaris, Linum usitatissimum, Litchi chinensis, Lotus spp., Luffa acutangula, Lupinus spp., Luzula sylvatica, Lycopersicon spp. (e.g. Lycopersicon esculenturn, Lycopersicon lycopersicum, Lycopersicon pyriforme), Macrotyloma spp., Malus spp., Malpighia emarginata, Mammea americana, Mangifera indica, Manihot spp., Manilkara zapota, Medicago sativa, Melilotus spp., Mentha spp., Miscanthus sinensis, Momordica spp., Morus nigra, Musa spp., Nicotiana spp., Olea spp., Opuntia spp., Ornithopus spp., Oryza spp. (e.g. Oryza sativa, Oryza latifolia), Panicum miliaceum, Panicum virgatum, Passiflora edulis, Pastinaca sativa, Pennisetum sp., Persea spp., Petroselinum crispum, Phalaris arundinacea, Phaseolus spp., Phleum pratense, Phoenix spp., Phragmites australis, Physalis spp., Pinus spp., Pistacia vera, Pisum spp., Poa spp., Populus spp., Prosopis spp., Prunus spp., Psidium spp., Punica granatum, Pyrus communis, Quercus spp., Raphanus sativus, Rheum rhabarbarum, Ribes spp., Ricinus communis, Rubus spp., Saccharum spp., Salix sp., Sambucus spp., Secale cereale, Sesamum spp., Sinapis sp., Solanum spp. (e.g. Solanum tuberosum, Solanum integrifolium or Solanum lycopersicum), Sorghum bicolor, Spinacia spp., Syzygium spp., Tagetes spp., Tamarindus indica, Theobroma cacao, Trifolium spp., Tripsacum dactyloides, Triticosecale rimpaui, Triticum spp. (e.g. Triticum aestivum, Triticum durum, Triticum turgidum, Triticum hybernum, Triticum macha, Triticum sativum, Triticum monococcum or Triticum vulgare), Tropaeolum minus, Tropaeolum majus, Vaccinium spp., Vicia spp., Vigna spp., Viola odorata, Vitis spp., Zea mays, Zizania palustris, Ziziphus spp., amongst others.

### Control Plant(s)

[0375] The choice of suitable control plants is a routine part of an experimental setup and may include corresponding wild type plants or corresponding plants without the gene of interest. The control plant is typically of the same plant species or even of the same variety as the plant to be assessed. The control plant may also be a nullizygote of the plant to be assessed. Nullizygotes (or null control plants) are individuals missing the transgene by segregation. Further, control plants are grown under equal growing conditions to the growing conditions of the plants of the invention, i.e. in the vicinity of, and simultaneously with, the plants of the invention. A “control plant” as used herein refers not only to whole plants, but also to plant parts, including seeds and seed parts.

### DESCRIPTION OF FIGURES

[0376] The present invention will now be described with reference to the following figures in which:

[0377] FIG. 1 is an RNA gel blot analysis on the expressions of OsNAC1. (a) Expression of OsNAC1 in response to stress conditions in rice. 14-d-old seedlings were exposed to drought, high salinity, ABA, or low temperature for the indicated time points. For drought stress, the seedlings were air dried at 28° C.; for high-salinity stress, seedling were exposed to 400 mM NaCl at 28° C.; for low-temperature stress, seedling were exposed to 4° C.; for ABA treatment, seedlings were exposed to a solution containing 100 μM ABA. (b) RNA gel-blot analysis for three homozygous T₅ lines of RCc3:OsNAC1, GOS2:OsNAC1 and NT plants. Equal loading of RNAs were determined by using ethidium bromide (EtBr) staining. (−) and (+) represent null and transgenic lines, respectively.

[0378] FIG. 2 Stress tolerance of RCc3:OsNAC1 ad GOS2:OsNAC1 plants at the vegetative stage. (a) Images of plants during drought stress. Three independent homozygoues T₅ lines of RCc3:OsNAC1 and GOS2:OsNAC1 plants and NT controls were grown for two weeks, subjected to 5 d of drought stress and followed by 7 d of re-watering in the greenhouse indicated by plus (+) sign. (b) Comparison of the chlorophyll fluorescence (Fᵥ/Fₘ) of rice plants exposed to drought, high-salinity, and low-temperature stress conditions. Each data point represents the mean±SE of triplicate experiments (n=10).

[0379] FIG. 3 Agronomic traits of RCc3:OsNAC1 and GOS2:OsNAC1 plants in the field under normal (a) and drought (b) conditions for two cultivating seasons (2009-2010). Agronomic traits of three independent homozygous T₅ (2009) and T₆ (2010) lines for each transgenic plant together with NT controls were plotted using Microsoft Excel. Each data point represents the percentage of the mean values (n=30) with the NT plants assigned as 100%. CL, culm length; PL, panicle length; NP, number of panicles per hill; NSP, number of spikelets per panicle; TNS, total number of spikelets; FR, filling rate; NFG, number of filled grains; TGW, total grain weight; 1000 GW, 1,000 grain weight.

[0380] FIG. 4 Comparison of the root growth of RCc3:OsNAC1, GOS2:OsNAC1 and NT plants grown at the heading stage of reproduction. (a) Upper panel shows representative roots for each plant while lower panel shows 1 representative root for each plant. Bars=10 cm and 2 mm in upper and lower panels, respectively. (b) Light-microscopic images of cross-sectioned transgenic and NT plant roots. The whole-cross-section of the roots (top panel), vascular bundles within the stele (middle panel), and the epidermis and part of the cortex (bottom panel). co, cortex; xy, xylem; ae, aerenchyma; epidermis indicated by arrowhead. Bars=500 μm in top panel, 100 μm in middle and bottom panels. (c) The volume, length, dry weight and diameter of transgenic plant roots normalized to NT. Values are the means±SD of 50 roots (10 roots from each of five plants). Asterisks (**) indicate significant mean difference at the 0.01 level (LSD).

[0381] FIG. 5 shows RNA gel-blot analysis on the expressions of OsNAC5

A, Ten μg of total RNA was prepared from the leaf and root tissues of 14 d-old seedlings exposed to drought, high salinity, ABA or low temperature for the indicated time periods. For drought stress, the seedlings were air-dried at 28° C.; for high-salinity stress, seedlings were exposed to 400 mM NaCl at 28° C.; for low-temperature stress, seedlings were exposed to 4° C.; for ABA treatment, seedlings were exposed to a solution containing 100 μM ABA. Total RNAs were blotted and hybridized with OsNAC5 gene-specific probes. The blots were then reprobed for the Dip1 (Oh et al., 2005b) and rbcS (Jang et al., 1999) genes, which were used as markers for up- and down-regulation, respectively, of key genes following stress treatments. Ethidium bromide (EtBr) staining was used to determine equal loading of RNAs.
B, RNA gel-blot analyses were performed using total RNA preparations from the roots and leaves of three homozygous T₅ lines of RCc3:OsNAC5 and GOS2:OsNAC5 plants, respectively, and of non-transgenic (NT) control plants. The blots were hybridized with OsNAC5 gene specific probes, and also reprobed for rbcS and Tubulin. Ethidium bromide staining was used to determine equal loading of RNAs. (−) nullizygous (segregants without transgene) lines, (+) transgenic lines.
FIG. 6 shows stress tolerance of RCc3:OsNAC5 ad GOS2:OsNAC5 plants
[0382] A. The appearance of transgenic plants during drought stress. Three independent homozygous T₆ lines of RCc3:OsNAC5 and GOS2:OsNAC5 plants and non-transgenic (NT) controls were grown for 4 weeks, subjected to 3 days of drought stress and followed by 7 days re-watering in the greenhouse. Images were taken at the indicated time points. ‘+’ denotes the number of re-watering days under normal growth conditions.
[0383] B. Changes in the chlorophyll fluorescence (Fv/Fm) of rice plants under drought, high salinity and low temperature stress conditions. Three independent homozygous T₆ lines of RCc3:OsNAC5 and GOS2:OsNAC5 plants and NT controls grown in MS medium for 14 days were subjected to various stress conditions as described in the Examples section. After these stress treatments, the Fv/Fm values were measured using a pulse modulation fluorometer (mini-PAM, Walze, Germany). All plants were grown under continuous light of 150 μmol m⁻² s⁻¹ prior to stress treatments. Each data point represents the mean±SE of triplicate experiments (n=10).
[0384] C. The L-band of the plants under drought conditions was revealed through the difference kinetics at the F_{O} to F_{K} computed using the equation ΔW_{OK}=V_{OKsample}−V_{OKcontrol}; left axis. Double normalization at the O to K phase; Vₒₖ=(Fₜ−F_{O})/(F_{K}−F_{O}); right axis.
[0385] D. Events for V_{OI}≧1.0 illustrating the differences in the pool size of the end electron acceptors; V_{OI}=(Fₜ−F_{O})/(Fₜ−F_{O}) under normal and drought conditions.

[0386] FIG. 7 shows agronomic traits of RCc3:OsNAC5 and GOS2:OsNAC5 plants grown in the field under both normal (A) and drought (B) conditions

Spider plots of the agronomic traits of three independent homozygous T₅ and T₆ lines of RCc3:OsNAC5 and GOS2:OsNAC5 plants and corresponding non-transgenic (NT) controls under both normal and drought conditions were drawn using Microsoft Excel. Each data point represents the percentage of the mean values (n=30) listed in Table III and IV. The mean measurements from the NT controls were assigned a 100% reference value. CL, culm length; PL, panicle length; NP, number of panicles per hill; NSP, number of spikelets per panicle; TNS, total number of spikelets; FR, filling rate; NFG, number of filled grains; TGW, total grain weight; 1,000 GW, thousand grain weight.

[0387] FIG. 8 shows the difference in root growth of RCc3:OsNAC5 and GOS2:OsNAC5 plants

A, The root volume, length, dry weight and diameter of RCc3:OsNAC5 and GOS2:OsNAC5 plants are normalized to those of NT control roots. ** The mean difference is significant at the 0.01 level (LSD). Values are the means±SD of 50 roots (10 roots from each of 5 plants).
B, One representative root of RCc3:OsNAC5, GOS2:OsNAC5 and NT control plants that were grown to the heading stage of reproduction. Scale Bars=2 mm.
C, Light microscopic images of cross-sectioned RCc3:OsNAC5, GOS2:OsNAC5 and NT roots. The position of the metaxylem vessel (Me) and aerenchyma (Ae) are indicated. Scale bars, 500 μm in upper panels and 100 μm in middle and lower panels.

[0388] FIG. 9 represents a multiple alignment of various NAC1 polypeptides. The asterisks indicate identical amino acids among the various protein sequences, colons represent highly conserved amino acid substitutions, and the dots represent less conserved amino acid substitution; on other positions there is no sequence conservation. These alignments can be used for defining further motifs or signature sequences, when using conserved amino acids.

[0389] FIG. 10 represents a multiple alignment of various NAC5 polypeptides. The asterisks indicate identical amino acids among the various protein sequences, colons represent highly conserved amino acid substitutions, and the dots represent less conserved amino acid substitution; on other positions there is no sequence conservation. These alignments can be used for defining further motifs or signature sequences, when using conserved amino acids.

### EXAMPLES

[0390] The present invention will now be described with reference to the following examples, which are by way of illustration only. The following examples are not intended to limit the scope of the invention. Unless otherwise indicated, the present invention employs conventional techniques and methods in plant biology, molecular biology, bioinformatics and plant breedings.

[0391] For DNA manipulation, unless otherwise stated, recombinant DNA techniques are performed according to standard protocols described in (Sambrook (2001) Molecular Cloning: a laboratory manual, 3rd Edition Cold Spring Harbor Laboratory Press, CSH, New York) or in Volumes 1 and 2 of Ausubel et al. (1994), Current Protocols in Molecular Biology, Current Protocols. Standard materials and methods for plant molecular work are described in Plant Molecular Biology Labfax (1993) by R. D. D. Croy, published by BIOS Scientific Publications Ltd (UK) and Blackwell Scientific Publications (UK).

### A: Experimental Procedures

### (i) Plasmid Construction and Transformation of Rice with OsNAC1

[0392] The coding region of OsNAC1 was amplified using the primer pairs: forward (5′-ATGGGGATGGGGATGAGGAG-3′), reverse (5′-TCAGAACGGGACCATGCCCA-3′) from the total RNA using the RT-PCR system (Promega) according to the manufacturer's instructions. For overexpression in rice, the cDNA for OsNAC1 was linked to the GOS2 promoter for constitutive expression, and to the RCc3 promoter for root specific expression using the Gateway system (Invitrogen, Carlsbad, Calif.). Plasmids were introduced into Agrobacterium tumefaciens LBA4404 by triparental mating and embryogenic (Oryza sativa cv Nipponbare) calli from mature seeds were transformed as previously described (Jang et al., 1999).

### (ii) Plasmid Construction and Transformation of Rice with OsNAC5

[0393] The coding region of OsNAC5 (AK102475) was amplified from rice total RNA using an RT-PCR system (Promega, Wis.), according to the manufacturer's instructions. Primer pairs were as follows: forward (5′-ATGGAGTGCGGTGGTGCGCT-3′) and reverse (5′-TTAGAACGGCTTCTGCAGGT-3′). To enable the overexpression of the OsNAC5 gene in rice, the cDNA for this gene was linked to the GOS2 promoter for constitutive expression, and the RCc3 promoter for root specific expression using the Gateway system (Invitrogen, Carlsbad, Calif.). Plasmids were introduced into Agrobacterium tumefaciens LBA4404 by triparental mating and embryogenic (Oryza sativa cv Nipponbare) calli from mature seeds were transformed as previously described (Jang et al., 1999).

### (iii) Drought Treatments of Rice Plants at Vegetative Stage

[0394] Seeds from transgenic and non-transgenic (NT) rice (Oryza sativa cv Nipponbare) plants were germinated in half-strength MS solid medium and placed in a dark growth chamber at 28° C. for 4 days. Seedlings were transplanted into soil and then grown in a greenhouse (16-h-light/8-h-dark cycles) at 28-30° C. Before undertaking the drought-stress experiments, eighteen seedlings from each transgenic and non-transgenic lines were grown in pots (3×3×5 cm; 1 plant per pot) for four weeks. Drought stress was simulated by withholding water to the seedling for 3-5 days while recovery tests were performed by re-watering the drought-stressed plants and observed for 7 days. The numbers of plants that survived or continued to grow were then scored.

### (iv) RNA Gel-Blot Analysis NAC5

[0395] Rice (Oryza sativa cv Nipponbare) seeds were germinated in soil and grown in a glasshouse (16 h light/8 h dark cycle) at 28° C. For high-salinity and ABA treatments, 14-days-old seedlings were transferred to nutrient solution containing 400 mM NaCl or 100 μM ABA for the indicated periods in the glasshouse under continuous light of approximately 1000 μmol/m²/s. For drought treatment, 14-days-old seedlings were excised and air dried for the indicated time course under continuous light of approximately 1000 μmol/m²/s. For low-temperature treatments, 14-days-old seedlings were exposed at 4° C. in a cold chamber for the indicated time course under continuous light of 150 μmol/m²/s. The preparation of total RNA and RNA gel-blot analysis was performed as reported previously (Jang et al., 2002).

### (v) Northern Blot Analysis

[0396] Seeds from rice (Oryza sativa cv Nipponbare) were germinated in soil and grown in a glasshouse (16 h light/8 h dark cycle) at 22° C. The total RNA was prepared from 14-days-old seedlings exposed to drought, high salinity, ABA, or low temperature for the indicated time points. For high-salinity and ABA treatments, seedlings were transferred to nutrient solution containing 400 mM NaCl or 100 μM ABA for the indicated periods in the glasshouse under continuous light of approximately 1000 μmol/m²/s. For drought treatment, seedlings were excised and air dried for the indicated time course under continuous light of approximately 1000 μmol/m²/s. For low-temperature treatments, seedlings were exposed at 4° C. in a cold chamber for the indicated time course under continuous light of 150 μmol/m²/s. 10 μg of total RNAs were blotted and hybridized with OsNAC1 gene-specific probes. The blots were then reprobed with the Dip1 gene, which was used as a marker for the up-regulation of key genes following stress treatments. Ethidium bromide (EtBr) staining was used to determine equal loading of RNAs. Samples for the RNA gel-blot analysis was preared from the total RNA (10 μg) of leaf and root samples for each of the three homozygous T₅ lines of RCc3:OsNAC1, GOS2:OsNAC1 and NT plants. Blots were hybridized with OsNAC1 gene-specific probe and reprobed for RbcS and Tubulin. Equal loading of RNAs were determined by using ethidium bromide (EtBr) staining. The preparation of total RNA and RNA gel-blot analysis was followed to that Jang et al. (2002).

### (vi) Measurement of Chlorophyll Fluorescence Under Drought, High-Salinity and Low Temperature Conditions

[0397] Seeds from transgenic and non-transgenic rice (Oryza sativa cv Nipponbare) plants were germinated and grown in half-strength MS solid medium for 14 d. The growth chamber had the following light and dark settings 16-h-light of 150 μmol m⁻² s⁻¹/8-h-dark cycles at 28° C. The green portions of approximately 10 seedlings were then cut using a scissors prior to stress treatments in vitro. All stress conditions were conducted under continuous light at 150 μmol m⁻² s⁻¹. For low-temperature stress administration, the seedlings were incubated at 4° C. in water for up to 6 h. High-salinity stress was induced by incubation in 400 mM NaCl for 2 h at 28° C. To simulate drought stress, the plants were air-dried for 2 h at 28° C. Fᵥ/Fₘ values were then measured as previously described (Oh et al 2005).

### (vii) Rice 3′-Tiling Microarray Analysis

[0398] Rice 3′-Tiling Microarray was used for expression profiling analysis as previously described (Oh et al., 2009). Transgenic and non-transgenic rice (Oryza sativa cv Nipponbare) seeds were germinated in soil and grown in a glasshouse (16 h light/8 h dark cycle) at 22° C. To identify stress-inducible NAC genes in rice, total RNA (100 μg) was prepared from 14-d-old leaves of plants subjected to drought, high-salinity, ABA, and low-temperature stress conditions. For the high salinity and ABA treatments, the 14-d-old seedlings were transferred to a nutrient solution containing 400 mM NaCl or 100 μM ABA for 2 h in the greenhouse under continuous light of approximately 1000 μmol m⁻² s⁻¹. For drought treatment, 14-d-old seedlings were air-dried for 2 h also under continuous light of approximately 1000 μmol m⁻² s⁻¹. For low temperature treatments, 14-d-old seedlings were exposed at 4° C. in a cold chamber for 6 h under continuous light of 150 μmol m⁻² s⁻¹. For identification of genes up-regulated in RCc3:OsNAC1, GOS2:OsNAC1 plants, total RNA (100 μg) was prepared from root and leaf tissues of 14-d-old transgenic and non-transgenic rice seedlings (Oryza sativa cv Nipponbare) grown under normal growth conditions.

### (viii) Drought Treatments and Grain Yield Analysis of Rice Plants in the Field for Two (2009 and 2010) Years

[0399] To evaluate yield components of transgenic plants under normal field conditions, three independent T₅ (2009) and T₆ (2010) homozygous lines of the RCc3:OsNAC1 and GOS2:OsNAC1 plants, together with non-transgenic (NT) controls were transplanted to a paddy field at the Rural Development Administration, Suwon, Korea (2009) and Kyungpook National University, Gunwi, Korea (2010). A randomized design was employed with three replicates for the two cultivating seasons 2009-2010. Seedlings were randomly transplanted 25 d after sowing within a15×30 cm spacing with single seedling per hill. Fertilizer was applied at 70N/40P/70K kg ha⁻¹ after the last paddling and 45 d after transplantation. Yield parameters were scored for 30 plants per transgenic line per season. Plants located at borders were excluded from data scoring.

[0400] To evaluate yield components of transgenic plants under drought field conditions, three independent T₅ (2009) and T₆ (2010) homozygous lines of each of the RCc3:OsNAC1 and GOS2:OsNAC1 plants, and NT controls, were transplanted to a removable rain-off shelter (located at Myongji University, Yongin, Korea) with a 1 meter deep container filled with natural paddy soil.

[0401] The experimental design, transplanting spacing, use of fertilizer, drought treatments and scoring of agronomic traits was employed as described (Oh et al., 2009). When the plants grown under normal and drought conditions had reached maturity and the grains had ripened, they were harvested and threshed by hand (separation of seeds from the vegetative parts of the plant). The unfilled and filled grains were then taken apart, independently counted using a Countmate MC1000H (Prince Ltd, Korea), and weighed. The following agronomic traits were scored: panicle length (cm), number of panicles per hill, number of spikelets per panicle, number of spikelets per hill, filling rate (%), number of filled spikelets per hill, total grain weight (g), and 1,000 grain weight (g). The results from three independent lines were separately analyzed by one way ANOVA and compared with those of the NT controls. The ANOVA was used to reject the null hypothesis of equal means of transgenic lines and NT controls (p<0.05). SPSS version 16.0 was used to perform these statistical analyses.

[0402] The procedure above was also used for RCc3:OsNAC5 and GOS2:OsNAC5 plants.

### (ix) Microscopic Examination of Roots

[0403] Microscopic examination of roots was performed as described by Jeong et al. (2010). As an overview, the roots of transgenic and non-transgenic plants at the panicle heading stage were fixed with a modified Karnovsky's fixative at 4° C. overnight and washed with the same buffer three times for 10 min each. They were post-fixed in the same buffer at 4° C. for 2 h and washed with distilled water two times briefly. The post-fixed root tissues were enbloc stained at 4° C. overnight. They were dehydrated in a graded ethanol series (30, 50, 70, 80, 95, and 100%) and three times in 100% ethanol for 10 min each. Dehydrated samples were further treated with propylene oxide as a transitional fluid two times for 30 min each and embedded in Spurr's medium. Ultrathin sections (approximately 1 μm thick) were made with a diamond knife by an ultra-microtome (MT-X; RMC Inc., Tucson, Ariz.). The sections were stained with 1% toluidine blue and observed and photographed under a light microscope.

### (x) JIP Analysis

[0404] The chlorophyll a fluorescence transients of the plants were measured using the Handy-PEA fluorimeter (Plant Efficiency Analyzer, Hansatech Instruments Ltd., King's Lynn Norfolk, PE 30 4NE, UK), as described previously (Redillas et al., 2011a and 2011 b). Plants were dark-adapted for at least 30 min to ensure sufficient opening of reaction centers (RCs) i.e. the RCs are fully oxidized. Two plants were chosen for each of the three independent T₆ homozygous lines. The tallest and the visually healthy-looking leaves were selected for each plant and measured at their apex, middle and base parts. The readings were averaged using the Handy PEA Software (version 1.31). The Handy-PEA fluorimeter was set using the following program: the initial fluorescence was set as O (50 μs), J (2 ms) and I (30 ms) are intermediates, and P as the peak (500 ms-1s). The transients were induced by red light at 650 nm of 3,500 μmol photons m⁻²s⁻¹ provided by the 3 light-emitting diodes, focused on a spot of 5 mm in diameter and recorded for 1 s with 12 bit resolution. Data acquisition was set at every 10 μs (from 10 μs to 0.3 ms), every 0.1 ms (from 0.2 to 3 ms), every 1 ms (from 3 to 30 ms), every 10 ms (from 30 to 300 ms) and every 100 ms (from 300 ms to 1 s). Normalizations and computations were performed using the Biolyzer 4HP software (v4.0.30.03.02) according to the equations of the JIP-test. The difference kinetics computed for the OK phase (ΔW_{OK}) was performed by subtracting the normalized data of samples (V_{OKsample}) by the untreated NT (V_{OKcontrol}). Normalization for each data set performed following the equation V_{OK}=(Fₜ−F_{O})/(F_{K}−F_{O}). The graphs were made using OriginPro 8 SR0 v9.0724 (B724).

### B: Results

### Example 1

### Transgenic Overexpression of OsNAC1 Confers Stress Tolerance at the Vegetative Stage of Growth

[0405] We performed RNA gel blot analysis using total RNAs from leaves and roots of 14-d-old seedlings exposed to drought, high-salinity, low temperature and ABA in a time course. Expression of endogenous OsNAC1 in rice leaves and roots was up-regulated significantly by drought, high-salinity and ABA but weakly by low-temperature conditions (FIG. 1a). To overexpress OsNAC1 in transgenic rice plants, the full-length cDNA of OsNAC1 was linked to two different promoters, RCc3 for root-specific expression (RCc3:OsNAC1) and GOS2 for constitutive expression (GOS2:OsNAC1). Fifteen to twenty independent transgenic lines per construct were produced through the Agrobacterium-mediated transformation method. T₁₋₆ seeds from transgenic lines that grew normal without stunting were collected and three independent T₅₋₆ homozygous lines of both RCc3:OsNAC1 and GOS2:OsNAC1 plants were selected for further analysis. The expression of RCc3:OsNAC1 and GOS2:OsNAC1 was confirmed by RNA gel-blot analysis in both roots and leaves (FIG. 1b). Expression of the transgene OsNAC1 was not detected in the leaves of RCc3:OsNAC1 plants while the roots showed high levels of transgene expression validating the root-specificity of the RCc3 promoter. Expression levels of the transgene were similarly increased in both roots and leaves of GOS2:OsNAC1 plants. In addition, expression levels of the transgene were higher in roots of RCc3:OsNAC1 plants than in roots of GOS2:OsNAC1 plants while those of the reference Tublin remained consistent.

[0406] To evaluate stress-tolerance of OsNAC1 overexpressors at the vegetative stage of growth, four-week-old transgenic and non-transgenic (NT) control plants were subjected to drought stress for up to 5 d (FIG. 2a). Transgenic plants showed delayed leaf rolling compared to NT during drought treatments. After re-watering, transgenic plants started to recuperate while NT plants continuously withered with no signs of recovery, demonstrating drought tolerance of the transgenic plants at the vegetative stage. Since environmental stresses affect the photosynthetic machinery of plants, the maximum photochemical efficiency of PSII (Fᵥ/Fₘ: Fᵥ, variable fluorescence; Fₘ, maximum fluorescence) was measured using a pulse amplitude modulation fluorometer (FIG. 2b). Fourteen-d-old plants were subjected to a time course of drought, high-salinity and low-temperature stress and their Fᵥ/Fₘ, values determined. Both under drought and high-salinity conditions, RCc3:OsNAC1 and GOS2:OsNAC1 plants showed higher Fᵥ/Fₘ, values than NT control plants by 10-30% depending on the extent of stress and transgenic lines. Under low temperature conditions, in contrast, no difference in Fᵥ/Fₘ, values was observed between the transgenic and NT control plants. Together, these results indicate enhanced tolerance of both transgenic plants to drought stress at the vegetative stage of growth.

[0407] Table I below shows: Analysis of seed production parameters in RCc3:OsNAC1 and GOS2:OsNAC1 plants under normal growth conditions for 2009 and 2010.

TABLE I
Analysis of seed production parameters in RCc3: OsNAC1 and GOS2:
OsNAC1 plants under normal growth conditions for 2009 and 2010.

| | Construct | | | | | | | | | |
|---|---|---|---|---|---|---|---|---|---|---|
| | Culm | | Panicle | | No. of | | No. of | | No. of Total | |
| | Length | | Length | | Panicles | | Spikelets | | Spikelets | |
| | (cm) | | (cm) | | (/hill) | | (/panicle) | | (/hill) | |
| Normal | 2009 | 2010 | 2009 | 2010 | 2009 | 2010 | 2009 | 2010 | 2009 | 2010 |
| NT (Nipponbare) | 70.92 | 89.50 | 19.13 | 21.03 | 9.70 | 13.77 | 90.55 | 107.65 | 944.73 | 1468.23 |
| RCc3: OsNAC1-10 | 74.57 * | 90.53 | 20.12 * | 21.87 * | 10.87 * | 13.80 | 91.18 | 111.45 | 976.97 | 1545.63 |
| % Δ | 5.15 | 1.15 | 5.14 | 3.99 | 12.03 | 0.22 | 0.69 | 3.53 | 3.41 | 5.27 |
| RCc3: OsNAC1-34 | 74.85 * | 90.53 | 20.20 * | 22.13 * | 10.57 | 14.27 | 91.44 | 113.39 | 994.07 | 1604.30 |
| % Δ | 5.55 | 1.15 | 5.57 | 5.23 | 8.93 | 3.63 | 0.98 | 5.33 | 5.22 | 9.27 |
| RCc3: OsNAC1-60 | 69.75 | 85.70 * | 20.60 * | 22.57 * | 10.20 | 13.80 | 97.64 * | 130.10 * | 1012.60 | 1771.87 * |
| % Δ | −1.65 | −4.25 | 7.67 | 7.32 | 5.15 | 0.22 | 7.83 | 20.85 | 7.18 | 20.68 |
| NT (Nipponbare) | 70.92 | 89.50 | 19.13 | 21.03 | 9.70 | 13.77 | 90.55 | 107.65 | 944.73 | 1468.23 |
| GOS2: OsNAC1-2 | 75.83 * | 89.70 | 20.97 * | 22.83 * | 10.80 * | 14.63 | 97.31 * | 121.61 * | 1066.73 * | 1749.50 * |
| % Δ | 6.93 | 0.22 | 9.58 | 8.56 | 11.34 | 6.25 | 7.47 | 12.97 | 12.91 | 19.16 |
| GOS2: OsNAC1-63 | 72.80 * | 86.80 * | 20.33 * | 22.10 * | 12.30 * | 13.97 | 91.55 | 115.87 | 1113.20 * | 1566.37 |
| % Δ | 2.66 | −3.02 | 6.27 | 5.09 | 26.80 | 1.45 | 1.10 | 7.64 | 17.83 | 6.68 |
| GOS2: OsNAC1-78 | 76.92 * | 90.93 | 21.80 * | 23.83 * | 11.47 * | 14.27 | 103.26 * | 121.81 * | 1175.63 * | 1665.07 * |
| % Δ | 8.46 | 1.60 | 13.94 | 13.31 | 18.21 | 3.63 | 14.04 | 13.15 | 24.44 | 13.41 |

| | Construct | | | | | | | |
|---|---|---|---|---|---|---|---|---|
| | Filling | | No. of Filled | | Total Grain | | 1000 Grain | |
| | Rate | | Spikelets | | Weight | | Weight | |
| | (%) | | (/hill) | | (g) | | (g) | |
| Normal | 2009 | 2010 | 2009 | 2010 | 2009 | 2010 | 2009 | 2010 |
| NT (Nipponbare) | 92.08 | 82.74 | 880.50 | 1215.23 | 20.76 | 27.82 | 24.28 | 22.92 |
| RCc3: OsNAC1-10 | 92.94 | 85.41 * | 908.07 | 1318.00 | 23.47 * | 31.64 * | 25.84 * | 24.09 * |
| % Δ | 0.93 | 3.23 | 3.13 | 8.46 | 13.04 | 13.73 | 6.43 | 5.10 |
| RCc3: OsNAC1-34 | 92.32 | 85.87 * | 912.27 | 1372.40 | 24.01 * | 32.36 * | 25.47 * | 23.92 |
| % Δ | 0.26 | 3.78 | 3.61 | 12.93 | 15.64 | 16.32 | 4.89 | 4.36 |
| RCc3: OsNAC1-60 | 90.38 * | 82.15 | 928.80 | 1458.50 * | 24.54 * | 31.88 * | 23.70 | 21.87 |
| % Δ | −1.84 | −0.71 | 5.49 | 20.02 | 18.17 | 14.59 | −2.38 | −4.58 |
| NT (Nipponbare) | 92.08 | 82.74 | 880.50 | 1215.23 | 20.76 | 27.82 | 24.28 | 22.92 |
| GOS2: OsNAC1-2 | 91.10 | 82.27 | 945.33 | 1437.10 * | 24.93 * | 33.11 * | 26.38 * | 23.13 |
| % Δ | −1.06 | −0.57 | 7.36 | 18.26 | 20.07 | 19.02 | 8.66 | 0.92 |
| GOS2: OsNAC1-63 | 87.22 * | 81.53 | 971.57 * | 1279.80 | 26.35 * | 31.64 * | 27.13 * | 24.86 * |
| % Δ | −5.28 | −1.46 | 10.34 | 5.31 | 26.91 | 13.73 | 11.73 | 8.46 |
| GOS2: OsNAC1-78 | 90.78 | 81.94 | 1068.97 * | 1365.50 | 27.45 * | 32.84 * | 25.70 * | 24.08 * |
| % Δ | −1.41 | −0.97 | 21.40 | 12.37 | 32.22 | 18.04 | 5.85 | 5.06 |

Each parameter value represents the mean ± SD (n = 30) for RCc3: OsNAC1 and GOS2: OsNAC1 plants and the respective NT controls.
Percentage differences (% Δ) between the values for the RCc3: OsNAC1 and GOS2: OsNAC1 plants and for the respective NT controls are presented.
Asterisk (*) indicate significant difference (p < 0.05).

### Example 2

### Overexpression of OsNAC1 Increases Grain Yield Under Both Normal and Drought Conditions

[0408] Yield components of the transgenic plants under normal and field drought conditions were evaluated for two cultivating seasons (2009 and 2010). Three independent T₅ (2009) and T₆ (2010) homozygous lines of RCc3:OsNAC1 and GOS2:OsNAC1 plants, together with non-transgenic (NT) controls, were transplanted to a paddy field and grown to maturity. Yield parameters were scored for 30 plants per transgenic line from three replicates. Data sets from two years of field test were generally consistent and total grain weights of the RCc3:OsNAC1 and the GOS2:OsNAC1 plants were increased by 13-18% and 13-32%, respectively. The increase of total grain weight was due mainly to the increased panicle length in RCc3:OsNAC1 plants and to the increased panicle length and number in GOS2:OsNAC1 plants (FIG. 3a; Table I).

[0409] To test the transgenic plants under drought conditions, three independent T₅ and T₆ lines of RCc3:OsNAC1 and GOS2:OsNAC1 plants were transplanted to a paddy field with a removable rain-off shelter. Plants were exposed to drought stress at the panicle heading stage (from 10 d before heading and 10 d after heading). The level of drought stress imposed under the rain-off shelter was equivalent to those that give 40-50% of total grain weight obtained under normal growth conditions, which was evidenced by the difference in levels of total grain weight of NT plants between the normal and drought conditions (Supplementary Tables S1 and S2). Statistical analysis of the yield parameters scored for two cultivating seasons showed that the decrease in grain yield under drought conditions was significantly smaller in the RCc3:OsNAC1 plants than that observed in the NT controls. Specifically, in the drought-treated RCc3:OsNAC1 plants, the filling rate was 18-36% higher than the drought-treated NT plants, which resulted in the increase in total grain weight by 28-72%, depending on transgenic line (FIG. 3b; Table II). In the drought-treated GOS2:OsNAC1 plants, in contrast, the total grain weight remained similar to the drought-treated NT controls. Given similar levels of drought tolerance during the vegetative stage in the RCc3:OsNAC1 and GOS2:OsNAC1 plants, the differences in total grain weight under field drought conditions were unexpected.

[0410] The root architecture of transgenic plants was also observed, measuring root volume, length, dry weight and diameter of RCc3:OsNAC1, GOS2:OsNAC1 and NT plants grown to the heading stage of reproduction. As shown in FIG. 4b, root diameter of the RCc3:OsNAC1 and GOS2:OsNAC1 plants was thicker by 30% and 7% than that of NT control plants, respectively. Microscopic analysis of cross-sectioned roots revealed that the increase in root diameter was due to the enlarged stele, cortex and epidermis of RCc3:OsNAC1 roots. In particular, the aerenchyma (ae in FIG. 4b) was bigger in the RCc3:OsNAC1 roots compared to the GOS2:OsNAC1 and NT plants, which may have contributed to the enlargement of the RCc3:OsNAC1 roots along with enlarged stele. The fact that root-specific overexpression of OsNAC1 increases root diameter with larger aerenchyma was correlated with the enhanced drought tolerance of transgenic plants at the reproductive stage. The volume, length and dry weight of the GOS2:OsNAC1 roots increased by 50%, 20% and 35% relative to NT roots, respectively, suggesting that these parameters also affected the increase in grain yield of the plants under normal growth conditions.

[0411] Under normal growth conditions, both plants showed higher grain yield compared to non-transgenic (NT) controls. The improvement in the total grain weight of RCc3:OsNAC1 plants was due mainly to the increase in the panicle length whereas those of GOS2:OsNAC1 plants was due to a number of traits including panicle length, number of panicles, and number of spikelets. Under drought conditions, in contrast, RCc3:OsNAC1 plants significantly enhanced the total grain weight by 28-72% due mainly to the increase in filling rate while GOS2:OsNAC1 plants showed no significant changes in either trait.

[0412] The root-specific overexpression of OsNAC1 clearly played an important role in the improvement of rice yield particularly under drought conditions. The RCc3:OsNAC1 and GOS2:OsNAC1 plants at T₅ or later generations did not show any unwanted pleiotropic effects such as growth retardation, abnormal leaf shape and color, and panicle underdevelopment which were, if any, segregated out during the pre-screening at earlier generations. Thus in comparison to NT controls, the changes in responses exhibited by RCc3:OsNAC1 and GOS2:OsNAC1 plants at T₅₋₆ were contributed solely by the transgene. The root characteristics of RCc3:OsNAC1 plants at heading stage of reproduction showed an increase in root diameter as compared to those of NT controls and GOS2:OsNAC1 plants. The increase was apparently due to the enlarged xylem, bigger cortical cells and epidermis. The thick roots with enlarged xylem contribute to a better water flux and have lesser risk of cavitation than thin roots (Yambao et al., 1992). Also, bigger roots have a direct role in drought tolerance since the large size of root diameter is related to penetration (Clark et al., 2008; Nguyen et al., 1997) and branching (Fitter, 1991; Ingram et al., 1994) ability.

[0413] Table II below shows: Analysis of seed production parameters in RCc3:OsNAC1 and GOS2:OsNAC1 plants under drought stress conditions for 2009 and 2010.

TABLE II
Analysis of seed production parameters in RCc3: OsNAC1 and GOS2:
OsNAC1 plants under drought stress conditions for 2009 and 2010.

| | Construct | | | | | | | | | |
|---|---|---|---|---|---|---|---|---|---|---|
| | Culm | | Panicle | | No. of | | No. of | | No. of Total | |
| | Length | | Length | | Panicles | | Spikelets | | Spikelets | |
| | (cm) | | (cm) | | (/hill) | | (/panicle) | | (/hill) | |
| Drought | 2009 | 2010 | 2009 | 2010 | 2009 | 2010 | 2009 | 2010 | 2009 | 2010 |
| NT (Nipponbare) | 63.93 | 56.47 | 19.04 | 18.58 | 11.24 | 12.06 | 79.25 | 90.05 | 868.21 | 1089.50 |
| RCc3: OsNAC1-10(+) | 68.29 * | 53.14 | 19.25 | 20.42 * | 10.83 | 12.83 | 88.59 | 92.74 | 893.71 | 1174.78 |
| % Δ | 6.81 | −5.90 | 1.09 | 9.87 | −3.60 | 6.45 | 11.79 | 2.99 | 2.94 | 7.83 |
| RCc3: OsNAC1-34(+) | 68.50 * | 6.67 * | 18.96 | 19.56 | 11.42 | 12.28 | 91.35 | 102.00 | 1015.42 * | 1222.11 |
| % Δ | 7.14 | 12.74 | −0.44 | 5.23 | 1.59 | 1.84 | 15.27 | 13.28 | 16.96 | 12.17 |
| RCc3: OsNAC1-60(+) | 64.42 | 60.94 | 18.79 | 19.60 * | 11.33 | 13.00 * | 95.95 * | 125.96 * | 1064.08 * | 1623.04 * |
| % Δ | 0.75 | 7.91 | −1.31 | 5.49 | 0.85 | 7.83 | 21.08 | 39.89 | 22.56 | 48.97 |
| NT (Nipponbare) | 63.93 | 56.47 | 19.04 | 18.58 | 11.24 | 12.06 | 79.25 | 90.05 | 868.21 | 1089.50 |
| GOS2: OsNAC1-2(+) | 67.63 * | 56.06 | 19.31 | 19.61 | 10.78 | 13.50 | 78.12 | 91.80 | 812.67 | 1214.83 |
| % Δ | 5.77 | −0.74 | 1.42 | 5.53 | −4.05 | 11.98 | −1.42 | 1.94 | −6.40 | 11.50 |
| GOS2: OsNAC1-63(+) | 62.79 | 57.58 | 19.15 | 20.17 * | 11.04 | 11.22 | 82.42 | 101.90 | 896.21 | 1125.83 |
| % Δ | −1.79 | 1.97 | 0.55 | 8.52 | −1.75 | −6.91 | 4.00 | 13.16 | 3.23 | 3.33 |
| GOS2: OsNAC1-78(+) | 71.04 * | 55.53 | 19.90 * | 20.14 * | 11.91 | 13.83 * | 81.89 | 111.24 * | 942.96 | 1525.89 * |
| % Δ | 11.12 | −1.67 | 4.49 | 8.37 | 6.01 | 14.75 | 3.33 | 23.54 | 8.61 | 40.05 |

| | Construct | | | | | | | |
|---|---|---|---|---|---|---|---|---|
| | Filling | | No. of Filled | | Total Grain | | 1000 Grain | |
| | Rate | | Spikelets | | Weight | | Weight | |
| | (%) | | (/hill) | | (g) | | (g) | |
| Drought | 2009 | 2010 | 2009 | 2010 | 2009 | 2010 | 2009 | 2010 |
| NT (Nipponbare) | 47.36 | 47.62 | 419.74 | 515.33 | 8.58 | 10.09 | 20.21 | 19.49 |
| RCc3: OsNAC1-10(+) | 64.62 * | 56.44 * | 562.46 * | 679.22 | 11.05 * | 13.87 * | 20.00 | 20.79 |
| % Δ | 36.46 | 18.54 | 34.00 | 31.80 | 28.73 | 37.50 | −1.02 | 6.68 |
| RCc3: OsNAC1-34(+) | 61.63 * | 58.33 * | 626.88 * | 713.72 | 13.28 * | 14.35 * | 20.94 | 20.13 |
| % Δ | 30.15 | 22.50 | 49.35 | 38.50 | 54.70 | 42.24 | 3.65 | 3.30 |
| RCc3: OsNAC1-60(+) | 64.65 * | 54.34 | 680.04 * | 896.04 | 13.65 * | 17.37 * | 19.97 | 19.01 |
| % Δ | 36.51 | 14.12 | 62.02 | 73.88 | 59.03 | 72.14 | −1.16 | −2.45 |
| NT (Nipponbare) | 47.36 | 47.62 | 419.74 | 515.33 | 8.58 | 10.09 | 20.21 | 19.49 |
| GOS2: OsNAC1-2(+) | 58.88 * | 45.98 | 471.74 | 556.39 | 9.85 | 11.23 | 20.86 | 20.18 |
| % Δ | 24.34 | −3.43 | 12.39 | 7.97 | 14.81 | 11.23 | 3.22 | 3.57 |
| GOS2: OsNAC1-63(+) | 53.02 | 53.76 | 467.74 | 601.72 | 8.30 | 11.80 | 19.60 | 19.79 |
| % Δ | 11.95 | 12.90 | 11.44 | 16.76 | −3.28 | 16.96 | −3.01 | 1.54 |
| GOS2: OsNAC1-78(+) | 52.68 | 46.80 | 488.27 * | 712.28 | 10.06 | 11.15 | 20.60 | 18.88 |
| % Δ | 11.24 | −1.71 | 16.33 | 38.22 | 17.29 | 10.50 | 1.93 | −3.12 |

Each parameter value represents the mean ± SD (n = 30) for RCc3: OsNAC1 and GOS2: OsNAC1 plants and the respective NT controls.
Percentage differences (% Δ) between the values for the RCc3: OsNAC1 and GOS2: OsNAC1 plants and for the respective NT controls are presented.
Asterisk (*) indicate significant difference (p < 0.05).

### Example 3

### Identification of Genes Up-Regulated by Overexpressed OsNAC1

[0414] Expression profiling was performed for RCc3:OsNAC1 and GOS2:OsNAC1 roots to identify up-regulated genes following the overexpression of OsNAC1. Rice 3′-Tiling Microarray was performed on RNA samples extracted from the roots of 14-d-old plants grown under normal conditions. Each data set was obtained from duplicate biological samples. Statistical analysis using one-way ANOVA (p<0.01) identified 46 genes to be up-regulated more than 3-fold in RCc3:OsNAC1 and GOS2:OsNAC1 roots following OsNAC1 overexpression (Table I). Also identified were 9 and 28 genes that were specific to RCc3:OsNAC1 and to GOS2:OsNAC1 roots, respectively (Table A). The highly up-regulated target genes common to both transgenic roots include 9-cis-epoxycarotenoid dioxygenase, a gene for ABA biosynthesis, calcium-transporting ATPase, a component for Ca²⁺ signaling for cortical cell death (apoptosis) leading to aerenchyma formation, cinnamoyl CoA reductase 1, a gene involved in lignin biosynthesis for barrier formation (Casparian Strip) surrounding the aerenchyma. Interestingly, O-methyltransferase, a gene for suberin biosynthesis that is also necessary for barrier formation, was specifically up-regulated only in RCc3:OsNAC1 roots. Such target genes up-regulated specifically in the transgenic roots may account for the difference in root architecture, hence drought tolerance at the reproduction stage.

[0415] The common target genes include 9-cis-epoxycarotenoid dioxygenase, calcium-transporting ATPase and cinnamoyl CoA reductase 1. The oxidative cleavage of cis-epoxycarotenoids by 9-cis-epoxycarotenoid dehydrogenase (NCED) to generate xanthoxin is the critical and the rate-limiting step in the regulation of ABA biosynthesis (Tan et al., 1997). The NCED gene was up-regulated by more than 20-fold in both transgenic plants which may have contributed to the sensitivity of the plants when exposed to drought stress. The Ca²⁺-transporting-ATPase (Ca²⁺-ATPase) was up-regulated by 26- and 32-fold in RCc3:OsNAC1 and GOS2:OsNAC1 plants, respectively. A transient increase in cytosolic Ca²⁺, derived from either influx from the apoplastic space or released from internal stores, serves as an early response to low temperature, drought and salinity stress in plant cells (Knight, 2000). Coupled with the increase of cytosolic Ca²⁺ is the rupture of tonoplasts which also indicate early events preceding the death of root cortical cells followed by the formation of aerenchyma—the gas filled spaces in the cortical region of roots. This explains the contribution of bigger cortical cells observed in RCc3:OsNAC1 roots. Aerenchyma serves as anatomical adaptions in rice that help minimize loss of O₂ to the surrounding soil for respiration by the apical meristem. These structures include a suberized hypodermis and a layer of lignified cells immediately interior to the hypodermis, both of which are only slightly gas permeable (Drew et al., 2000). Interestingly, cinnamoyl-CoA reductase (CCR), a gene encoding a key enzyme (EC 1.2.144) in lignin biosynthesis, was up-regulated in RCc3:OsNAC1 and GOS2:OsNAC1 plants following OsNAC1 overexpression. CCR is the first enzyme specific to the biosynthetic pathway leading to production of monolignols p-coumaryl, coniferyl, and sinapyl alcohols, controlling the quantity and quality of lignin (Jones et al., 2001). Down-regulation of the AtCCR1, an Arabidopsis homologue, caused drastic alterations in the plant's phenotypes (Goujon et al., 2003). Also, the loss-of-function mutation in maize (Zmccr1^{-/-}) resulted in a slight decrease of lignin content and caused significant changes in lignin structure (Tamasloukht et al., 2011). The maize gene ZmCCR2 was found to be induced by drought conditions and can be detected mainly in roots (Fan et al., 2006). Along with CCR, cinnamyl alcohol dehydrogenase (CAD), another gene encoding an enzyme involved in lignin biosynthesis, was also up-regulated in both plants. CAD catalyzes the final conversion of hydroxycinnamoyl aldehydes (monolignals) to monolignols in lignin biosynthesis pathway (Sattler et al. 2009). Furthermore, O-methyltransferase, a gene encoding an enzyme (EC=2.1.1-) involved in suberin biosynthesis, was specifically up-regulated in RCc3:OsNAC1 plants. In Arabidopsis the mRNA ZRP4, which codes for O-methyltransferase, was found to accumulate preferentially in roots and is located predominantly in the region of the endodermis with low levels seen in the leaves, stems and other shoot organs (Held et al., 1993). The up-regulation of three O-methyltransferase genes using the root-specific promoter may have contributed to the enhanced drought tolerance of RCc3:OsNAC1 plants over GOS2:OsNAC1 and NT plants due to its involvement in suberin biosynthesis. Lignin, together with suberin, have major roles in impeding radial oxygen loss through lignification and/or suberization of the walls of root peripheral layers in a process called barrier formation. This barrier formation on the radial and transverse walls of endo- and exodermal cells is generally associated with Casparian Strips (CSs). The main function of CSs is to inhibit water and salt transport into the stele by blocking selective apoplastic bypass in the root (Ma et al, 2003). Cai et al. (2011) reported that the development of CSs on the endodermis and exodermis in the salt- and drought-tolerant Liaohan 109 occurred earlier than the moderately salt-sensitive Tianfeng 202 and the salt-sensitive Nipponbare. The group also reported that even without the salt in nutrient solution, the development of CSs in Liaohan 109 had been brought forward and increased. Thus, the results of microarray provided us insights on how the plants endured drought stress and how the regulation of genes was affected by the overexpression of OsNAC1 either specifically in roots or throughout the whole plant body.

[0416] Results from microarray showed 46 up-regulated target genes common to RCc3:OsNAC1 and GOS2:OsNAC1 roots (Table A). In addition, 9 and 28 target genes were found to be specifically up-regulated in RCc3:OsNAC1 and GOS2:OsNAC1 roots, respectively (Table A). The common target genes include 9-cis-epoxycarotenoid dioxygenase, calcium-transporting ATPase and cinnamoyl CoA reductase 1. The oxidative cleavage of cis-epoxycarotenoids by 9-cis-epoxycarotenoid dehydrogenase (NCED) to generate xanthoxin is the critical and the rate-limiting step in the regulation of ABA biosynthesis (Tan et al., 1997). The NCED gene was up-regulated for more than 20-fold in both transgenic plants which may have contributed to the sensitivity of the plants when exposed to drought stress. The Ca²⁺-transporting-ATPase (Ca²⁺-ATPase) was up-regulated by 26- and 32-fold in RCc3:OsNAC1 and GOS2:OsNAC1 plants, respectively. A transient increase in cytosolic Ca²⁺, derived from either influx from the apoplastic space or released from internal stores, serves as an early response to low temperature, drought and salinity stress in plant cells (Knight, 2000). Coupled with the increase of cytosolic Ca²⁺ is the rupture of tonoplasts which also indicate early events preceding the death of root cortical cells followed by the formation of aerenchyma—the gas filled spaces in the cortical region of roots. This explains the contribution of bigger cortical cells observed in RCc3:OsNAC1 roots. Aerenchyma serves as anatomical adaptions in rice that help minimize loss of O₂ to the surrounding soil for respiration by the apical meristem. These structures include a suberized hypodermis and a layer of lignified cells immediately interior to the hypodermis, both of which are only slightly gas permeable (Drew et al., 2000). Interestingly, cinnamoyl-CoA reductase (CCR), a gene encoding a key enzyme (EC 1.2.144) in lignin biosynthesis, was up-regulated in RCc3:OsNAC1 and GOS2:OsNAC1 plants following OsNAC1 overexpression. CCR is the first enzyme specific to the biosynthetic pathway leading to production of monolignols p-coumaryl, coniferyl, and sinapyl alcohols, controlling the quantity and quality of lignin (Jones et al., 2001). Down-regulation of the AtCCR1, an Arabidopsis homologue, caused drastic alterations in the plant's phenotypes (Goujon et al., 2003). Also, the loss-of-function mutation in maize (Zmccr1^{-/-}) resulted in a slight decrease of lignin content and caused significant changes in lignin structure (Tamasloukht et al., 2011). The maize gene ZmCCR2 was found to be induced by drought conditions and can be detected mainly in roots (Fan et al., 2006). Along with CCR, cinnamyl alcohol dehydrogenase (CAD), another gene encoding an enzyme involved in lignin biosynthesis, was also up-regulated in both plants. CAD catalyzes the final conversion of hydroxycinnamoyl aldehydes (monolignals) to monolignols in lignin biosynthesis pathway (Sattler et al. 2009). Furthermore, O-methyltransferase, a gene encoding an enzyme (EC=2.1.1-) involved in suberin biosynthesis, was specifically up-regulated in RCc3:OsNAC1 plants. In Arabidopsis the mRNA ZRP4, which codes for O-methyltransferase, was found to accumulate preferentially in roots and is located predominantly in the region of the endodermis with low levels seen in the leaves, stems and other shoot organs (Held et al., 1993). The up-regulation of three O-methyltransferase genes using the root-specific promoter may have contributed to the enhanced drought tolerance of RCc3:OsNAC1 plants over GOS2:OsNAC1 and NT plants due to its involvement in suberin biosynthesis as described above. Thus, the results of microarray provided us insights on how the plants endured drought stress and how the regulation of genes was affected by the overexpression of OsNAC1 either specifically in roots or throughout the whole plant body.

TABLE A
Up-regulated root-expressed genes in RCc3: OsNAC1 and GOS2:
OsNAC1 plants in comparison to non-transgenic controls.

| | Loc No^{a} | RCc3: OsNAC1 | | GOS2: OsNAC1 | |
|---|---|---|---|---|---|
| Gene Name | (IRGSP) | Mean^{b} | p-val^{c} | Mean^{b} | p-val^{c} |

Up-regulated genes in RCc3: OsNAC1 and GOS2: OsNAC1

| | | | | | |
|---|---|---|---|---|---|
| Protein kinase | Os01g0117600 | 3.60 | 0.00 | 3.04 | 0.00 |
| ABC transporter | Os01g0609300 | 3.39 | 0.00 | 4.44 | 0.00 |
| Peptidase aspartic | Os01g0937500 | 3.40 | 0.00 | 3.37 | 0.00 |
| Cytochrome P450 | Os02g0601400 | 5.35 | 0.00 | 2.91 | 0.00 |
| WAK3 | Os02g0807900 | 5.02 | 0.00 | 4.47 | 0.00 |
| Cinnamoyl CoA Reductase 1 | Os02g0811800 | 10.65 | 0.00 | 7.47 | 0.00 |
| Acyl-activating enzyme | Os03g0130100 | 3.09 | 0.00 | 3.31 | 0.00 |
| Phytosulfokine | Os03g0232400 | 3.69 | 0.00 | 2.85 | 0.00 |
| U-box | Os03g0240600 | 6.16 | 0.00 | 7.27 | 0.00 |
| Aspartyl protease | Os03g0318400 | 3.59 | 0.00 | 3.61 | 0.00 |
| High affinity K+ transporter 5 | Os03g0575200 | 5.28 | 0.00 | 5.03 | 0.00 |
| Copalyl diphosphate synthetase | Os04g0178300 | 3.50 | 0.00 | 3.56 | 0.00 |
| RLP (receptor-like protein kinase) | Os04g0202700 | 4.10 | 0.00 | 4.16 | 0.00 |
| MAPKKK9 | Os04g0339800 | 7.17 | 0.00 | 6.91 | 0.00 |
| WAK2 | Os04g0365100 | 4.60 | 0.00 | 3.56 | 0.00 |
| WAK2 | Os04g0368800 | 3.87 | 0.00 | 3.56 | 0.00 |
| Glutamate dehydrogenase | Os04g0543900 | 3.13 | 0.00 | 3.00 | 0.00 |
| Downy mildew resistnant 6 | Os04g0581000 | 4.49 | 0.00 | 4.55 | 0.00 |
| Oxidoreductase, 2OG-Fe(II) oxygenase | Os04g0581100 | 70.90 | 0.00 | 61.65 | 0.00 |
| Pyruvate kinase | Os04g0677300 | 3.27 | 0.00 | 4.05 | 0.00 |
| Zinc finger | Os05g0404700 | 3.11 | 0.00 | 5.46 | 0.00 |
| Aldo/keto reductase | Os05g0456100 | 3.89 | 0.00 | 2.37 | 0.00 |
| Aldo/keto reductase | Os05g0456200 | 3.40 | 0.00 | 2.57 | 0.00 |
| Early nodulin 93 | Os06g0141600 | 3.06 | 0.00 | 3.47 | 0.00 |
| Integral membrane protein | Os06g0218900 | 3.12 | 0.00 | 2.37 | 0.00 |
| Haem peroxidase | Os06g0521500 | 3.01 | 0.00 | 3.44 | 0.00 |
| Pathogenesis-related protein | Os07g0129300 | 3.08 | 0.00 | 3.44 | 0.00 |
| RLK (receptor lectin kinase) | Os07g0129800 | 4.87 | 0.00 | 3.96 | 0.00 |
| 9-cis-epoxycarotenoid dioxygenase | Os07g0154100 | 20.06 | 0.00 | 25.41 | 0.00 |
| Cloroplastosos alterados | Os07g0190000 | 4.09 | 0.00 | 4.50 | 0.00 |
| Leucine-rich repeat transmembrane kinase | Os07g0251900 | 8.22 | 0.00 | 5.96 | 0.00 |
| Leucine-rich repeat protein kinase | Os08g0201700 | 3.53 | 0.00 | 2.26 | 0.00 |
| Leucine-rich repeat protein kinase | Os08g0203400 | 7.64 | 0.00 | 6.21 | 0.00 |
| WRKY40 | Os09g0417600 | 7.64 | 0.00 | 7.21 | 0.00 |
| WRKY18 | Os09g0417800 | 6.93 | 0.00 | 7.16 | 0.00 |
| Potassium ion transmembrane transporter | Os09g0448200 | 7.71 | 0.00 | 7.06 | 0.00 |
| WAK2 | Os10g0151100 | 6.63 | 0.00 | 4.06 | 0.00 |
| Calcium-transporting ATPase | Os10g0418100 | 26.21 | 0.00 | 32.54 | 0.00 |
| Aspartyl protease | Os10g0537800 | 4.59 | 0.00 | 4.28 | 0.00 |
| Aspartyl protease | Os10g0538200 | 4.47 | 0.00 | 3.98 | 0.00 |
| DNA binding/Homeodomain | Os11g0282700 | 126.94 | 0.00 | 100.82 | 0.00 |
| Calcium-binding EF hand family protein | Os11g0600500 | 4.32 | 0.00 | 4.02 | 0.00 |
| Zinc finger | Os11g0687100 | 5.60 | 0.00 | 6.05 | 0.00 |
| Zinc finger | Os11g0702400 | 3.23 | 0.00 | 3.74 | 0.00 |
| Germin-like protein 9 | Os12g0154800 | 3.01 | 0.00 | 2.99 | 0.00 |
| AAA-ATPase 1 | Os12g0431100 | 3.10 | 0.00 | 4.24 | 0.00 |

Up-regulated genes in RCc3: OsNAC1

| | | | | | |
|---|---|---|---|---|---|
| Cytochrome P450 | Os02g0601500 | 5.42 | 0.00 | 1.86 | 0.00 |
| MtN3 | Os05g0426000 | 4.03 | 0.00 | 1.27 | 0.07 |
| Leucine-rich repeat | Os08g0202300 | 3.34 | 0.00 | 1.52 | 0.03 |
| O-methyltransferase | Os09g0344500 | 3.68 | 0.00 | 1.23 | 0.05 |
| AAA-type ATPase | Os09g0445700 | 31.09 | 0.00 | 1.15 | 0.11 |
| O-methyltransferase | Os10g0118000 | 4.39 | 0.00 | 1.50 | 0.01 |
| O-methyltransferase | Os10g0118200 | 6.36 | 0.00 | 1.30 | 0.06 |
| protein kinase | Os11g0274700 | 5.00 | 0.00 | 1.95 | 0.00 |
| Disease resistance protein | Os11g0491600 | 59.47 | 0.00 | 1.08 | 0.91 |

Up-regulated genes in GOS2: OsNAC1

| | | | | | |
|---|---|---|---|---|---|
| Aminotransferase | Os01g0729600 | 1.54 | 0.10 | 8.41 | 0.00 |
| Xyloglucosyl transferase | Os02g0280300 | −2.09 | 0.01 | 4.44 | 0.00 |
| Cinnamoyl CoA reductase 1 | Os02g0808800 | −1.23 | 0.47 | 9.51 | 0.00 |
| Downy mildew resistant 6 | Os03g0122300 | 1.78 | 0.01 | 3.01 | 0.00 |
| Proline extensin-like receptor kinase 1 | Os03g0269300 | 1.76 | 0.01 | 5.31 | 0.00 |
| WRKY1 | Os03g0335200 | 1.78 | 0.03 | 3.28 | 0.00 |
| Salt tolerance zinc finger | Os03g0437200 | −1.29 | 0.76 | 3.65 | 0.00 |
| AAA-ATPase 1 | Os03g0802400 | 1.44 | 0.15 | 3.13 | 0.00 |
| Hydrolase | Os04g0411800 | 1.81 | 0.01 | 3.30 | 0.00 |
| Hydrolase | Os04g0412000 | 1.55 | 0.03 | 3.05 | 0.00 |
| Membrane bound O-acyl transferase | Os04g0481800 | 1.92 | 0.02 | 4.22 | 0.00 |
| Cinnamyl alcohol dehydrogenase 6 | Os04g0612700 | −1.33 | 0.37 | 5.27 | 0.00 |
| Leucine-rich repeat | Os04g0621900 | −0.05 | 0.50 | 4.18 | 0.00 |
| Phosphofructokinase 3 | Os05g0194900 | 1.73 | 0.01 | 4.42 | 0.00 |
| Pyruvate decarboxylase | Os05g0469600 | 1.61 | 0.00 | 4.65 | 0.00 |
| L-lactate dehydrogenase | Os06g0104900 | 1.67 | 0.01 | 4.17 | 0.00 |
| Disease resistance protein | Os06g0279900 | −1.18 | 0.18 | 4.54 | 0.00 |
| FAD-binding domain-containing protein | Os06g0548200 | 2.00 | 0.00 | 3.78 | 0.00 |
| Universal stress protein | Os07g0673400 | 1.89 | 0.01 | 4.39 | 0.00 |
| Terpene synthase/cyclase | Os08g0167800 | 1.89 | 0.02 | 3.74 | 0.00 |
| Acidic endochitinase | Os08g0518900 | 1.95 | 0.00 | 4.03 | 0.00 |
| Pin-formed 5 | Os08g0529000 | 0.17 | 0.43 | 4.10 | 0.00 |
| Calcium-binding EF | Os09g0483100 | −0.08 | 0.94 | 6.22 | 0.00 |
| Calcium-binding EF hand | Os09g0483300 | 1.39 | 0.12 | 3.54 | 0.00 |
| Purple acid phosphatase 3 | Os10g0116800 | 1.46 | 0.21 | 3.96 | 0.00 |
| Phosphoenolpyruvate carboxykinas 1 | Os10g0204400 | 1.53 | 0.05 | 4.42 | 0.00 |
| HAT dimerization domain-containing | Os10g0567900 | −0.11 | 0.60 | 3.56 | 0.00 |
| protein | | | | | |
| Acidic endochitinase | Os11g0701000 | −1.27 | 0.65 | 3.03 | 0.00 |

^{a}Sequence identification numbers for the full-length cDNA sequences of the corresponding genes.
^{b}The mean of duplicate biological samples.
^{c}p-values were analyzed by one-way ANOVA (p < 0.01). These microarray data sets can be found at http://www.ncbi.nlm.nih.gov/geo/(Gene Expression Omnibus, GEO, Accession number)

### SEQ ID NO:s for Table A Sequences

Up-regulated genes in RCc3: OsNAC1 and GOS2: OsNAC1

| | | |
|---|---|---|
| Protein kinase | Os01g0117600 | SEQ ID NO: 48 & 49 |
| ABC transporter | Os01g0609300 | SEQ ID NO: 50 & 51 |
| Peptidase aspartic | Os01g0937500 | SEQ ID NO: 52 & 53 |
| Cytochrome P450 | Os02g0601400 | SEQ ID NO: 54 & 55 |
| WAK3 | Os02g0807900 | SEQ ID NO: 56 & 57 |
| Cinnamoyl CoA Reductase 1 | Os02g0811800 | SEQ ID NO: 58 & 59 |
| Acyl-activating enzyme | Os03g0130100 | SEQ ID NO: 60 & 61 |
| Phytosulfokine | Os03g0232400 | SEQ ID NO: 62 & 63 |
| U-box | Os03g0240600 | SEQ ID NO: 64 & 65 |
| Aspartyl protease | Os03g0318400 | SEQ ID NO: 66 & 67 |
| High affinity K+ transporter 5 | Os03g0575200 | SEQ ID NO: 68 & 69 |
| Copalyl diphosphate synthetase | Os04g0178300 | SEQ ID NO: 70 & 71 |
| RLP (receptor-like protein kinase) | Os04g0202700 | SEQ ID NO: 72 & 73 |
| MAPKKK9 | Os04g0339800 | SEQ ID NO: 74 & 75 |
| WAK2 | Os04g0365100 | SEQ ID NO: 76 & 77 |
| WAK2 | Os04g0368800 | SEQ ID NO: 78 & 79 |
| Glutamate dehydrogenase | Os04g0543900 | SEQ ID NO: 80 & 81 |
| Downy mildew resistnant 6 | Os04g0581000 | SEQ ID NO: 82 & 83 |
| Oxidoreductase, 2OG-Fe(II) oxygenase | Os04g0581100 | SEQ ID NO: 84 & 85 |
| Pyruvate kinase | Os04g0677300 | SEQ ID NO: 86 & 87 |
| Zinc finger | Os05g0404700 | SEQ ID NO: 88 & 89 |
| Aldo/keto reductase | Os05g0456100 | SEQ ID NO: 90 & 91 |
| Aldo/keto reductase | Os05g0456200 | SEQ ID NO: 92 & 93 |
| Early nodulin 93 | Os06g0141600 | SEQ ID NO: 94 & 95 |
| Integral membrane protein | Os06g0218900 | SEQ ID NO: 96 & 97 |
| Haem peroxidase | Os06g0521500 | SEQ ID NO: 98 & 99 |
| Pathogenesis-related protein | Os07g0129300 | SEQ ID NO: 100 & 101 |
| RLK (receptor lectin kinase) | Os07g0129800 | SEQ ID NO: 102 & 103 |
| 9-cis-epoxycarotenoid dioxygenase | Os07g0154100 | SEQ ID NO: 104 & 105 |
| Cloroplastosos alterados | Os07g0190000 | SEQ ID NO: 106 & 107 |
| Leucine-rich repeat transmembrane kinase | Os07g0251900 | SEQ ID NO: 108 & 109 |
| Leucine-rich repeat protein kinase | Os08g0201700 | SEQ ID NO: 110 & 111 |
| Leucine-rich repeat protein kinase | Os08g0203400 | SEQ ID NO: 112 & 113 |
| WRKY40 | Os09g0417600 | SEQ ID NO: 114 & 115 |
| WRKY18 | Os09g0417800 | SEQ ID NO: 116 & 117 |
| Potassium ion transmembrane transporter | Os09g0448200 | SEQ ID NO: 118 & 119 |
| WAK2 | Os10g0151100 | SEQ ID NO: 120 & 121 |
| Calcium-transporting ATPase | Os10g0418100 | SEQ ID NO: 122 & 123 |
| Aspartyl protease | Os10g0537800 | SEQ ID NO: 124 & 125 |
| Aspartyl protease | Os10g0538200 | SEQ ID NO: 126 & 127 |
| DNA binding/Homeodomain | Os11g0282700 | SEQ ID NO: 128 & 129 |
| Calcium-binding EF hand family protein | Os11g0600500 | SEQ ID NO: 130 & 131 |
| Zinc finger | Os11g0687100 | SEQ ID NO: 132 & 133 |
| Zinc finger | Os11g0702400 | SEQ ID NO: 134 & 135 |
| Germin-like protein 9 | Os12g0154800 | SEQ ID NO: 136 & 137 |
| AAA-ATPase 1 | Os12g0431100 | SEQ ID NO: 138 & 139 |

Up-regulated genes in RCc3: OsNAC1

| | | |
|---|---|---|
| Cytochrome P450 | Os02g0601500 | SEQ ID NO: 140 & 141 |
| MtN3 | Os05g0426000 | SEQ ID NO: 142 & 143 |
| Leucine-rich repeat | Os08g0202300 | SEQ ID NO: 144 & 145 |
| O-methyltransferase | Os09g0344500 | SEQ ID NO: 146 & 147 |
| AAA-type ATPase | Os09g0445700 | SEQ ID NO: 148 & 149 |
| O-methyltransferase | Os10g0118000 | SEQ ID NO: 150 & 151 |
| O-methyltransferase | Os10g0118200 | SEQ ID NO: 152 & 153 |
| protein kinase | Os11g0274700 | SEQ ID NO: 154 & 155 |
| Disease resistance protein | Os11g0491600 | SEQ ID NO: 156 & 157 |

Up-regulated genes in GOS2: OsNAC1

| | | |
|---|---|---|
| Aminotransferase | Os01g0729600 | SEQ ID NO: 158 & 159 |
| Xyloglucosyl transferase | Os02g0280300 | SEQ ID NO: 160 & 161 |
| Cinnamoyl CoA reductase 1 | Os02g0808800 | SEQ ID NO: 162 & 163 |
| Downy mildew resistant 6 | Os03g0122300 | SEQ ID NO: 164 & 165 |
| Proline extensin-like receptor kinase 1 | Os03g0269300 | SEQ ID NO: 166 & 167 |
| WRKY1 | Os03g0335200 | SEQ ID NO: 168 & 169 |
| Salt tolerance zinc finger | Os03g0437200 | SEQ ID NO: 170 & 171 |
| AAA-ATPase 1 | Os03g0802400 | SEQ ID NO: 172 & 173 |
| Hydrolase | Os04g0411800 | SEQ ID NO: 174 & 175 |
| Hydrolase | Os04g0412000 | SEQ ID NO: 176 |
| Membrane bound O-acyl transferase | Os04g0481800 | SEQ ID NO: 177 & 178 |
| Cinnamyl alcohol dehydrogenase 6 | Os04g0612700 | SEQ ID NO: 179 & 180 |
| Leucine-rich repeat | Os04g0621900 | SEQ ID NO: 181 & 182 |
| Phosphofructokinase 3 | Os05g0194900 | SEQ ID NO: 183 & 184 |
| Pyruvate decarboxylase | Os05g0469600 | SEQ ID NO: 185 & 186 |
| L-lactate dehydrogenase | Os06g0104900 | SEQ ID NO: 187 & 188 |
| Disease resistance protein | Os06g0279900 | SEQ ID NO: 189 & 190 |
| FAD-binding domain-containing protein | Os06g0548200 | SEQ ID NO: 191 & 192 |
| Universal stress protein | Os07g0673400 | SEQ ID NO: 193 & 194 |
| Terpene synthase/cyclase | Os08g0167800 | SEQ ID NO: 195 & 196 |
| Acidic endochitinase | Os08g0518900 | SEQ ID NO: 197 & 198 |
| Pin-formed 5 | Os08g0529000 | SEQ ID NO: 199 & 200 |
| Calcium-binding EF | Os09g0483100 | SEQ ID NO: 201 & 201 |
| Calcium-binding EF hand | Os09g0483300 | SEQ ID NO: 203 & 204 |
| Purple acid phosphatase 3 | Os10g0116800 | SEQ ID NO: 205 & 206 |
| Phosphoenolpyruvate carboxykinas 1 | Os10g0204400 | SEQ ID NO: 207 & 208 |
| HAT dimerization domain-containing protein | Os10g0567900 | SEQ ID NO: 209 & 210 |
| Acidic endochitinase | Os11g0701000 | SEQ ID NO: 211 & 212 |

### Example 4

### Transgenic Overexpression of OsNAC5 Increased Plant Tolerance to Drought and High-Salinity Conditions

[0418] To investigate the transcript levels of OsNAC5 under stress conditions, we performed RNA-gel blot analysis using total RNAs from leaf and root tissues of 14-d-old rice seedlings exposed to high salinity, drought, ABA and low temperature (FIG. 5A). Expression of OsNAC5 in both leaf and root tissues was significantly induced by treatments with drought, high-salinity and ABA, but not with low temperature conditions. Transcript levels of OsNAC5 started to increase at 0.5 h after drought and salt treatments and peaked at 2 h of the stress administration while the transcript levels gradually increased up to 6 h upon treatments with exogenous ABA.

[0419] To overexpress OsNAC5 in transgenic rice plants, two expression vectors, RCc3:OsNAC5 and GOS2:OsNAC5, were made by fusing cDNA of OsNAC5 with the RCc3 (Xu et al., 1995) and the GOS2 (de Pater et al., 1992) for a root-specific and a conserved expression, respectively. The expression vectors were transformed into rice (Oryza sativa cv Nipponbare) using the Agrobacterium-mediated method (Hiei et al., 1994), producing 15-20 transgenic plants per construct. T₁₋₆ seeds from transgenic lines that grew normal without stunting were collected and three independent T₅₋₆ homozygous lines of both RCc3:OsNAC1 and GOS2:OsNAC1 plants were selected for further analysis. To determine expression levels of OsNAC5 in the transgenic plants, RNA-gel blot analysis was carried out using total RNAs from leaf and root tissues of 14-d-old seedlings grown under normal growth conditions. Increased levels of OsNAC5 expression were detected only in roots of the RCc3:OsNAC5 plants and in both leaves and roots of the GOS2:OsNAC5 plants, but not in nontransgenic (NT) and nullizygous (segregants without transgene) plants (FIG. 5B). To evaluate tolerance of transgenic plants to drought stress, one-month-old transgenic and NT control plants were treated with drought stress by withholding water in the greenhouse. In the time course of drought treatments, both transgenic plants perform better than NT controls showing delayed symptoms of stress-induced damages, such as wilting and leaf rolling with concomitant loss of chlorophylls (FIG. 6A). The transgenic plants also recovered better during re-watering up to 7 d. The survival rates of transgenic plants ranged from 60 to 80% while NT control plants had no signs of recovery.

[0420] To further verify stress tolerance of the transgenic plants, we measured alterations in Fv/Fm values, an indicator of the photochemical efficiency of photosystem II (PSII) in a dark-adapted state. The leaf discs of two-weeks-old transgenic and NT control plants were treated with drought, high-salinity and low temperature for the indicated times. The Fv/Fm values of non-stressed plants were approximately 0.8. At the initial stage of drought (0.5 h) and high-salinity (2 h) conditions, Fv/Fm levels of the RCc3:OsNAC5 and GOS2:OsNAC5 plants were higher by 15-22% than those of NT controls (FIG. 6B). Under extended drought (2 h) and high-salinity (6 h) stress as well as low temperature conditions, however, the levels remained similar to those of NT controls, suggesting a moderate level of tolerance of the transgenic plants. The JIP test provides an alternative way of measuring stress tolerance by analyzing the chlorophyll a fluorescence transients between 50 μs and 300 μs after illumination of dark-adapted plants (Redillas et al., 2011a and 2011b). The JIP test carries information regarding the connectivity between the antennas of the PSII units. This connectivity can be illustrated by the difference kinetics revealing the so called L-band. This band is negative (or positive) when the connectivity of the plants is higher (or lower) than that of untreated NT controls. This connectivity is undetectable using the Fᵥ/Fₘ, analysis which also measures the chlorophyll a fluorescence of plants. We performed the JIP test on the plants at the reproductive stage, revealing that both transgenic plants had higher connectivity than NT controls under drought conditions (FIGS. 6C and D). More specifically, the connectivity is higher in the RCc3:OsNAC5 plants followed by the GOS2:OsNAC5 plants over NT controls, revealing differences in drought tolerance at the reproductive stage.

TABLE III
Agronomic traits of the RCc3: OsNAC5 and GOS2: OsNAC5
transgenic rice plants under normal field conditions

| Construct | | | |
|---|---|---|---|
| Panicle | No. of | No. of | No. of total |
| length | Panicles | Spikelets | spikelets |
| (cm) | (/hill) | (/panicle) | (/hill) |

| Normal | 2009 | 2010 | 2009 | 2010 | 2009 | 2010 | 2009 | 2010 |
|---|---|---|---|---|---|---|---|---|
| NT (Nipponbare) | 19.30 | 21.03 | 10.10 | 13.77 | 88.98 | 107.65 | 909.00 | 1468.23 |
| RCc3: OsNAC5-8 | 20.25 * | 22.07 * | 10.77 | 14.37 | 96.67 * | 112.45 | 1036.07 * | 1591.03 |
| % Δ | 4.92 | 4.91 | 6.60 | 4.36 | 8.64 | 4.46 | 13.98 | 8.36 |
| P-val | 0.00 | 0.01 | 0.14 | 0.41 | 0.01 | 0.17 | 0.00 | 0.10 |
| RCc3: OsNAC5-33 | 20.24 * | 22.63 * | 10.30 | 14.80 | 99.41 * | 102.75 | 1010.41 * | 1523.50 |
| % Δ | 4.87 | 7.61 | 1.94 | 7.51 | 11.72 | −4.56 | 11.16 | 3.76 |
| P-val | 0.00 | 0.00 | 0.67 | 0.16 | 0.00 | 0.16 | 0.01 | 0.45 |
| RCc3: OsNAC5-41 | 19.54 | 20.73 | 10.35 | 14.97 | 100.07 * | 105.65 | 1029.88 * | 1566.53 |
| % Δ | 1.24 | −1.43 | 2.44 | 8.72 | 12.47 | −1.86 | 13.30 | 6.70 |
| P-val | 0.43 | 0.43 | 0.59 | 0.10 | 0.00 | 0.56 | 0.00 | 0.18 |
| NT (Nipponbare) | 19.30 | 21.03 | 10.10 | 13.77 | 88.98 | 107.65 | 909.00 | 1468.23 |
| GOS2: OsNAC5-39 | 19.47 | 21.83 * | 9.80 | 13.30 | 105.14 * | 120.56 * | 1024.03 * | 1591.77 |
| % Δ | 0.86 | 3.80 | −2.97 | −3.39 | 18.17 | 11.99 | 12.65 | 8.41 |
| P-val | 0.57 | 0.02 | 0.50 | 0.56 | 0.00 | 0.00 | 0.00 | 0.20 |
| GOS2: OsNAC5-47 | 20.47 * | 22.07 * | 10.47 | 15.00 | 98.80 * | 114.03 | 1032.57 * | 1699.30 * |
| % Δ | 6.04 | 4.91 | 3.63 | 8.96 | 11.04 | 5.93 | 13.59 | 15.74 |
| P-val | 0.00 | 0.00 | 0.41 | 0.13 | 0.00 | 0.10 | 0.00 | 0.02 |
| GOS2: OsNAC5-53 | 18.57 * | 20.80 | 11.73 * | 13.50 | 87.59 | 124.66 * | 1022.17 * | 1670.43 * |
| % Δ | −3.80 | −1.11 | 16.17 | −1.94 | −1.57 | 15.80 | 12.45 | 13.77 |
| P-val | 0.01 | 0.50 | 0.00 | 0.74 | 0.58 | 0.00 | 0.00 | 0.04 |

| | Construct | | | | | | | |
|---|---|---|---|---|---|---|---|---|
| | Filling | | No. of filled | | Total grain | | 1000 grain | |
| | rate | | spikelets | | weight | | weight | |
| | (%) | | (/hill) | | (g) | | (g) | |
| Normal | 2009 | 2010 | 2009 | 2010 | 2009 | 2010 | 2009 | 2010 |
| NT (Nipponbare) | 91.29 | 82.74 | 846.60 | 1215.23 | 21.41 | 27.82 | 24.49 | 22.92 |
| RCc3: OsNAC5-8 | 90.22 | 82.77 | 933.37 * | 1316.50 | 24.52 * | 32.00 * | 26.30 * | 24.34 * |
| % Δ | −1.17 | 0.04 | 10.25 | 8.33 | 14.52 | 15.01 | 7.39 | 6.20 |
| P-val | 0.15 | 0.98 | 0.01 | 0.13 | 0.00 | 0.01 | 0.00 | 0.00 |
| RCc3: OsNAC5-33 | 93.42 * | 84.26 | 943.81 * | 1287.20 | 23.99 * | 31.40 * | 25.43 * | 24.31 * |
| % Δ | 2.33 | 1.83 | 11.48 | 5.92 | 12.01 | 12.85 | 3.85 | 6.06 |
| P-val | 0.01 | 0.28 | 0.01 | 0.28 | 0.01 | 0.03 | 0.00 | 0.00 |
| RCc3: OsNAC5-41 | 92.83 * | 85.20 | 955.54 * | 1333.07 | 23.41 * | 31.00 * | 24.51 | 23.32 |
| % Δ | 1.69 | 2.98 | 12.87 | 9.70 | 9.31 | 11.42 | 0.08 | 1.75 |
| P-val | 0.05 | 0.08 | 0.00 | 0.08 | 0.04 | 0.05 | 0.93 | 0.30 |
| NT (Nipponbare) | 91.29 | 82.74 | 846.60 | 1215.23 | 21.41 | 27.82 | 24.49 | 22.92 |
| GOS2: OsNAC5-39 | 92.05 | 83.11 | 941.77 * | 1322.40 | 24.47 * | 30.51 | 25.69 * | 23.28 |
| % Δ | 0.84 | 0.45 | 11.24 | 8.82 | 14.26 | 9.66 | 4.89 | 1.57 |
| P-val | 0.44 | 0.77 | 0.01 | 0.19 | 0.00 | 0.16 | 0.00 | 0.51 |
| GOS2: OsNAC5-47 | 90.84 | 85.28 * | 941.50 * | 1457.33 * | 24.38 * | 35.20 * | 25.87 * | 24.22 * |
| % Δ | −0.50 | 3.08 | 11.21 | 19.92 | 13.84 | 26.51 | 5.62 | 5.67 |
| P-val | 0.64 | 0.05 | 0.01 | 0.00 | 0.00 | 0.00 | 0.00 | 0.02 |
| GOS2: OsNAC5-53 | 81.40 * | 72.81 * | 830.63 | 1211.77 | 21.91 | 28.30 | 26.43 * | 23.61 |
| % Δ | −10.84 | −12.00 | −1.89 | −0.29 | 2.32 | 1.73 | 7.93 | 3.01 |
| P-val | 0.00 | 0.00 | 0.66 | 0.97 | 0.62 | 0.80 | 0.00 | 0.21 |

Each parameter value represents the mean ± SD (n = 30) for RCc3: OsNAC5 and GOS2: OsNAC5 plants and respective NT controls.
Percentage differences (% Δ) between the values for the RCc3: OsNAC5 and GOS2: OsNAC5 plants and respective NT controls are presented.
An asterisk (*) indicates a significant difference (p < 0.05).

### Example 5

### Overexpression of OsNAC5 Increases Grain Yield Under Both Normal and Drought Conditions

[0421] Field performance of RCc3:OsNAC5 and GOS2:OsNAC5 plants were evaluated for two cultivating seasons in a paddy field under normal and drought conditions. Three independent T₅ (2009) and T₆ (2010) homozygous lines of RCc3:OsNAC5 and GOS2:OsNAC5 plants, together with non-transgenic (NT) controls, were transplanted to a paddy field and grown to maturity. Yield parameters were scored for 30 plants per transgenic line from three replicates. Data sets from two years of field test were generally consistent and total grain weights of the RCc3:OsNAC5 and the GOS2:OsNAC5 plants were increased by 9-15% and 13-26%, respectively. The increased total grain weight in both transgenic plants was coupled with the increased number of spikelet per panicle and total number of spikelet with a filling rate similar to that of NT controls (FIG. 7A; Table III). To test the transgenic plants under drought conditions, three independent T₅ (2009) and T₆ (2010) lines of RCc3:OsNAC5 and GOS2:OsNAC5 plants were transplanted to a refined field equipped with a movable rain-off shelter. Plants were exposed to drought stress at the panicle heading stage (from 10 d before heading to 10 d after heading). After stressed until complete leaf-rolling, plants were irrigated overnight and immediately subjected again to the second round of drought treatments until complete leaf-rolling. Upon completion of drought treatments, plants were irrigated to allow recovery at the seed maturation stages. The level of drought stress imposed under the rain-off shelter was equivalent to those that give 40% of total grain weight obtained under normal growth conditions, which was evidenced by the difference in levels of total grain weight of NT plants between the normal and drought conditions (Tables III and IV). Statistical analysis of the yield parameters scored for two cultivating seasons showed that the decrease in grain yield under drought conditions was significantly smaller in the RCc3:OsNAC5 plants than that observed in either GOS2:OsNAC5 or NT controls. Specifically, in the drought-treated RCc3:OsNAC5 plants, the number of spikelet and/or filling rate were higher than in the drought-treated NT plants, which increased total grain weight by 33-63% (2009) and 22-48% (2010) depending on transgenic line (FIG. 7B; Table III). In the drought-treated GOS2:OsNAC5 plants, in contrast, the total grain weight was reduced (2009) than or remained similar (2010) to the drought-treated NT controls. Given similar levels of drought tolerance during the vegetative stage in the RCc3:OsNAC5 and GOS2:OsNAC5 plants, the differences in total grain weight under field drought conditions were rather unexpected. These observations prompted us to examine the root architecture of transgenic plants. We measured root volume, length, dry weight and diameter of RCc3:OsNAC5, GOS2:OsNAC5 and NT plants grown to the heading stage of reproduction. As shown in FIGS. 4A and B, root diameter of the RCc3:OsNAC5 and GOS2:OsNAC5 plants was larger by 30% and 10% than that of NT control plants, respectively. Microscopic analysis of cross-sectioned roots revealed that the increase in root diameter was due to the enlarged stele and aerenchyma of RCc3:OsNAC5 roots. In particular, the metaxylem (Me), a major portion of stele, and the aerenchyma (Ae), a tissue resulted from cortical cell death, were bigger in RCc3:OsNAC5 and GOS2:OsNAC5 roots as compared to NT roots (FIG. 8C). Size of metaxylem and aerenchyma had been previously correlated with drought tolerance at the reproductive stage (Yambao et al., 1992; Zhu et al., 2010). The volume and dry weight of the RCc3:OsNAC5 and GOS2:OsNAC5 roots were also increased, suggesting that these parameters together with diameter contributed to the increase in grain yield of the transgenic plants under normal and/or drought conditions.

TABLE IV
Agronomic traits of the RCc3: OsNAC5 and GOS2: OsNAC5
transgenic rice plants under field drought conditions

| Construct | | | |
|---|---|---|---|
| Panicle | No. of | No. of | No. of total |
| length | Panicles | Spikelets | spikelets |
| (cm) | (/hill) | (/panicle) | (/hill) |

| Drought | 2009 | 2010 | 2009 | 2010 | 2009 | 2010 | 2009 | 2010 |
|---|---|---|---|---|---|---|---|---|
| NT (Nipponbare) | 18.92 | 18.58 | 11.00 | 12.06 | 79.91 | 90.05 | 873.00 | 1089.50 |
| RCc3: OsNAC5-8 | 19.00 | 20.06 * | 10.83 | 12.00 | 86.20 | 110.04 * | 930.25 | 1296.61 * |
| % Δ | 0.44 | 7.92 | −1.52 | −0.46 | 7.87 | 22.21 | 6.56 | 19.01 |
| P-val | 0.84 | 0.00 | 0.75 | 0.20 | 0.07 | 0.02 | 0.21 | 0.01 |
| RCc3: OsNAC5-33 | 19.63 | 20.28 * | 11.65 | 11.11 | 82.19 | 107.67 * | 953.35 | 1168.83 * |
| % Δ | 3.74 | 9.12 | 5.93 | −7.83 | 2.85 | 19.57 | 9.20 | 7.28 |
| P-val | 0.09 | 0.00 | 0.21 | 0.94 | 0.51 | 0.01 | 0.08 | 0.01 |
| RCc3: OsNAC5-41 | 18.75 | 19.92 * | 10.88 | 13.06 | 93.41 * | 105.11 * | 1000.21 * | 1341.22 * |
| % Δ | −0.88 | 7.17 | −1.14 | 8.29 | 16.90 | 16.73 | 14.57 | 23.10 |
| P-val | 0.68 | 0.01 | 0.81 | 0.17 | 0.00 | 0.04 | 0.01 | 0.00 |
| NT (Nipponbare) | 18.92 | 18.58 | 11.00 | 12.06 | 79.91 | 90.05 | 873.00 | 1089.50 |
| GOS2: OsNAC5-39 | 19.00 | 19.00 | 11.70 | 12.22 | 84.52 | 95.52 | 977.96 * | 1144.17 |
| % Δ | 0.44 | 2.24 | 6.32 | 1.38 | 5.76 | 6.08 | 12.02 | 5.02 |
| P-val | 0.83 | 0.44 | 0.18 | 0.78 | 0.23 | 0.51 | 0.02 | 0.55 |
| GOS2: OsNAC5-47 | 18.58 | 19.50 | 11.00 | 13.17 | 76.82 | 92.34 | 834.92 | 1195.22 |
| % Δ | −1.76 | 4.93 | 0.00 | 9.22 | −3.86 | 2.55 | −4.36 | 9.70 |
| P-val | 0.38 | 0.09 | 1.00 | 0.07 | 0.42 | 0.78 | 0.40 | 0.25 |
| GOS2: OsNAC5-53 | 18.00 * | 19.86 * | 11.43 | 11.83 | 70.40 * | 112.85 * | 799.87 | 1304.78 * |
| % Δ | −4.85 | 6.88 | 3.95 | −1.84 | −11.90 | 25.32 | −8.38 | 19.76 |
| P-val | 0.02 | 0.02 | 0.40 | 0.71 | 0.02 | 0.01 | 0.11 | 0.02 |

| | Construct | | | | | | | |
|---|---|---|---|---|---|---|---|---|
| | Filling | | No. of filled | | Total grain | | 1000 grain | |
| | rate | | spikelets | | weight | | weight | |
| | (%) | | (/hill) | | (g) | | (g) | |
| Drought | 2009 | 2010 | 2009 | 2010 | 2009 | 2010 | 2009 | 2010 |
| NT (Nipponbare) | 47.03 | 47.62 | 406.79 | 515.33 | 8.55 | 10.09 | 21.12 | 19.49 |
| RCc3: OsNAC5-8 | 59.43 * | 52.25 * | 549.71 * | 677.89 * | 12.22 * | 12.40 * | 22.11 | 18.20 |
| % Δ | 26.36 | 9.73 | 35.13 | 31.54 | 42.81 | 22.91 | 4.71 | −6.59 |
| P-val | 0.00 | 0.00 | 0.00 | 0.00 | 0.00 | 0.00 | 0.05 | 0.309 |
| RCc3: OsNAC5-33 | 68.63 * | 63.05 * | 651.91 * | 742.78 * | 13.97 * | 14.97 * | 21.37 | 20.18 |
| % Δ | 45.91 | 32.40 | 60.26 | 44.14 | 63.30 | 48.35 | 1.21 | 3.55 |
| P-val | 0.00 | 0.00 | 0.00 | 0.02 | 0.00 | 0.00 | 0.62 | 0.062 |
| RCc3: OsNAC5-41 | 54.95 * | 46.47 | 556.17 * | 625.83 * | 11.39 * | 12.38 * | 20.20 | 20.02 |
| % Δ | 16.83 | −2.41 | 36.72 | 21.44 | 33.16 | 22.69 | −4.35 | 2.74 |
| P-val | 0.01 | 0.79 | 0.00 | 0.01 | 0.00 | 0.00 | 0.08 | 0.432 |
| NT (Nipponbare) | 47.03 | 47.62 | 406.79 | 515.33 | 8.55 | 10.09 | 21.12 | 19.49 |
| GOS2: OsNAC5-39 | 37.65 | 47.88 | 367.16 | 550.00 | 7.70 | 10.64 | 21.04 | 19.34 |
| % Δ | −19.95 | 0.95 | −9.74 | 6.73 | −10.01 | 5.45 | −0.35 | −0.75 |
| P-val | 0.05 | 0.96 | 0.39 | 0.64 | 0.38 | 0.71 | 0.90 | 0.886 |
| GOS2: OsNAC5-47 | 37.81 * | 49.59 | 317.83 * | 595.11 | 6.52 * | 11.31 | 20.45 | 19.93 |
| % Δ | −19.61 | 4.15 | −21.87 | 15.48 | −23.75 | 12.11 | −3.14 | 2.25 |
| P-val | 0.04 | 0.68 | 0.04 | 0.28 | 0.03 | 0.41 | 0.23 | 0.56 |
| GOS2: OsNAC5-53 | 22.18 * | 41.31 | 170.74 * | 550.78 | 3.72 * | 10.28 | 21.71 | 18.46 |
| % Δ | −52.84 | −13.25 | −58.03 | 6.88 | −56.54 | 1.93 | 2.79 | −5.27 |
| P-val | 0.00 | 0.18 | 0.00 | 0.63 | 0.00 | 0.90 | 0.30 | 0.228 |

Each parameter value represents the mean ± SD (n = 30) for RCc3: OsNAC5 and GOS2: OsNAC5 plants and respective NT controls.
Percentage differences (% Δ) between the values for the RCc3: OsNAC5 and GOS2: OsNAC5 plants and respective NT controls are presented.
An asterisk (*) indicates a significant difference (p < 0.05).

### Example 6

### Identification of Genes Up-Regulated Following OsNAC5 Overexpression

[0422] To identify genes that are up-regulated by the overexpression of OsNAC5, we performed expression profiling of the RCc3:OsNAC5 and GOS2:OsNAC5 plants in comparison with NT controls under normal growth conditions. This profiling was conducted using the Rice 3′-tiling microarray with RNA samples extracted from roots of 14-d-old plants grown under normal conditions. Each data set was obtained from two biological replicates. Statistical analysis using one-way ANOVA identified 25 target genes that were up-regulated following OsNAC5 overexpression by more than 3-fold in both transgenic roots as compared to NT controls (P<0.05). Also identified in the same analysis were 19 and 18 target genes that were up-regulated specifically in the RCc3:OsNAC5 and GOS2:OsNAC5 roots, respectively (Table B). Microarray experiments previously performed (GEO accession number GSE31874) revealed a total of 22 out of 62 target genes (7, 8 and 7 genes for common, RCc3:OsNAC5-specific and GOS2:OsNAC5-specific, respectively) to be stress-inducible under drought, high-salinity, cold and ABA (Table B). In addition, GLP (Yin et al., 2009), PDX (Titiz et al., 2006), MERI5 (Verica and Medford, 1997) and O-methyltransferase (Held et al., 1993), genes involved in cell growth and development, were up-regulated specifically in RCc3:OsNAC5 roots, suggesting their role(s) in alteration of root architecture. Those target genes that are either commonly or specifically up-regulated in OsNAC5 transgenic roots may account for the altered root architecture and thereby the increased drought tolerance phenotype.

[0423] The microoarray experiments identified 19 and 18 root-expressed genes that were up-regulated specifically in the RCc3:OsNAC5 and the GOS2:OsNAC5 plants, respectively, in addition to the 25 root-expressed genes that were up-regulated commonly in both plants. A number of genes that function in stress responses were up-regulated in both transgenic roots. These include cytochrome P450, ZIM, oxidase, stress response protein and heat shock protein. Also identified in both transgenic roots were transcription factors, such as WRKY, bZIP, and Zinc finger and reactive oxygen species scavenging systems such as multicopper oxidase, chitinase and glycosyl hydrolase. Increased expression of those target genes could have contributed to enhanced tolerance to drought conditions. Of the target genes specifically up-regulated in RCc3:OsNAC5 roots were GLP, PDX, MERI5 and O-methyltransferase that are known to function in cell growth and development. Arabidopsis GLP4, which specifically binds to IAA, was proposed to regulate cell growth (Yin et al., 2009). PDX is involved in vitamin B6 biosynthesis and Arabidopsis pdx1.3 mutants strongly reduced primary root growth and increased hypersensitivity to both salt and osmotic stress (Titiz et al., 2006). Overexpression of MERI5 in Arabidopsis led to aberrant development with cell expansion alterations (Verica and Medford, 1997). O-methyltransferase, a gene encoding an enzyme involved in suberin biosynthesis, was also specifically up-regulated in RCc3:OsNAC5 roots. In Arabidopsis, transcripts of ZRP4, a gene which encodes an O-methyltransferase, were found to accumulate preferentially in the roots and localize predominantly in the endodermis region with low levels detectable in the leaves, stems and other shoot organs (Held et al., 1993). The upregulation of three O-methyltransferase genes via a root-specific promoter may have contributed to the enhanced drought tolerance of RCc3:OsNAC5 plants over both GOS2:OsNAC5 and NT plants due to their involvement in suberin biosynthesis. Lignin and suberin play major roles in impeding radial oxygen loss through lignification and/or suberization of the walls of the root peripheral layers in a process known as barrier formation. Collectively, the increased expression of such target genes in RCc3:OsNAC5 roots enlarged root tissues enhancing tolerance to drought stress at reproductive stage.

[0424] Table B below shows: Up-regulated genes in RCc3:OsNAC5 and/or GOS2:OsNAC5 plants in comparison to non-transgenic controls.

[0425] ^{a}Sequence identification numbers for the full-length cDNA sequences of the corresponding genes. ^{b}Stress responsible genes to ABA (A), cold (C) drought (D) and salt (S) are based on our microarray profiling data (Accession number: GSE31874). ^{c}The mean of two independent biological replicates. Numbers in boldface indicate up-regulation by more than 3-fold (P<0.05). ^{d}P values were analyzed by one-way ANOVA. Genes discussed in the text are in boldface. These microarray data sets can be found at http://www.ncbi.nlm.nih.gov/geo/ (Gene Expression Omnibus, GEO), Accession number: GSE31856.

TABLE B

| | | RCc3: OsNAC5 | | GOS2: OsNAC5 | | ^{b}Stress |
|---|---|---|---|---|---|---|
| Gene Name | ^{a}Loc No | Mean^{b} | p-val^{c} | Mean^{b} | p-val^{c} | response |

Genes up-regulated in both RCc3: OsNAC5 and GOS2: OsNAC5 plants

| | | | | | | |
|---|---|---|---|---|---|---|
| Calcium-transporting ATPase | Os10g0418100 | 10.36 | 0.00 | 6.19 | 0.00 | C |
| Oxo-phytodienoic acid reductase | Os06g0215900 | 10.82 | 0.00 | 15.54 | 0.00 | |
| Cinnamoyl-CoA reductase | Os02g0811800 | 8.55 | 0.00 | 9.05 | 0.00 | |
| Chitinase | Os11g0701500 | 7.12 | 0.00 | 14.20 | 0.00 | |
| Cytochrome P450 | Os12g0150200 | 6.37 | 0.00 | 4.79 | 0.00 | C, D, S |
| CBS protein | Os02g0639300 | 6.04 | 0.00 | 3.70 | 0.00 | |
| Sulfotransferase | Os01g0311600 | 5.24 | 0.00 | 7.60 | 0.00 | |
| Aminotransferase | Os05g0244700 | 5.18 | 0.00 | 6.05 | 0.00 | A, D, S |
| Chitinase | Os11g0701000 | 4.97 | 0.00 | 14.04 | 0.00 | |
| Multicopper oxidase | Os01g0127000 | 4.69 | 0.00 | 4.91 | 0.00 | |
| Nicotianamine synthase | Os07g0689600 | 4.70 | 0.00 | 5.15 | 0.00 | |
| Pathogenesis-related transcriptional factor | Os07g0674800 | 4.09 | 0.00 | 12.03 | 0.00 | |
| Cinnamoyl-CoA reductase | Os02g0808800 | 4.14 | 0.00 | 11.52 | 0.00 | |
| Cinnamyl alcohol dehydrogenase | Os04g0612700 | 3.90 | 0.00 | 17.61 | 0.00 | |
| ZIM | Os03g0180900 | 4.06 | 0.00 | 3.07 | 0.00 | A, C, D, S |
| Glycoside hydrolase | Os05g0247800 | 4.07 | 0.00 | 4.04 | 0.00 | A, S |
| Glutathione-S-transferase | Os10g0530500 | 3.88 | 0.00 | 4.81 | 0.00 | |
| Iron-phytosiderophore transporter | Os02g0649900 | 3.86 | 0.00 | 5.40 | 0.00 | |
| Aminotransferase | Os01g0729600 | 3.21 | 0.00 | 15.45 | 0.00 | |
| Oxidase | Os06g0548200 | 3.61 | 0.00 | 3.82 | 0.00 | |
| Disease resistance response protein | Os07g0643800 | 3.07 | 0.00 | 3.45 | 0.00 | |
| WRKY | Os06g0649000 | 3.39 | 0.00 | 5.62 | 0.00 | D, S |
| Acyltransferase | Os03g0245700 | 3.06 | 0.00 | 3.76 | 0.00 | |
| Pyruvate kinase | Os04g0677300 | 3.01 | 0.00 | 3.66 | 0.00 | |
| Oxidative stress response protein | Os03g0830500 | 3.32 | 0.00 | 4.07 | 0.00 | D, S |

Genes up-regulated in RCc3: OsNAC5 plants

| | | | | | | |
|---|---|---|---|---|---|---|
| GLP | Os03g0694000 | 32.65 | 0.00 | 1.05 | 0.00 | A, S |
| C4-dicarboxylate transporter | Os04g0574700 | 30.10 | 0.00 | 1.11 | 0.00 | |
| O-methyltransferase | Os10g0118200 | 16.47 | 0.00 | −1.46 | 0.00 | A, S |
| Fructose-bisphosphate aldolase | Os08g0120600 | 11.27 | 0.00 | 1.01 | 0.00 | D, S |
| O-methyltransferase | Os09g0344500 | 8.43 | 0.00 | −1.09 | 0.00 | A, S |
| MtN | Os05g0426000 | 7.86 | 0.00 | 1.62 | 0.00 | |
| O-methyltransferase | Os10g0118000 | 7.09 | 0.00 | −2.23 | 0.00 | S |
| Dehydration-responsive protein | Os11g0170900 | 6.10 | 0.00 | 1.24 | 0.00 | D |
| Lipid transfer protein | Os01g0822900 | 5.06 | 0.00 | 1.61 | 0.00 | |
| Oxidase | Os03g0693900 | 4.86 | 0.00 | 1.99 | 0.00 | A, S |
| Glutamine synthetase | Os03g0712800 | 4.16 | 0.00 | 1.25 | 0.00 | |
| Lipid transfer protein | Os11g0115400 | 3.71 | 0.00 | 1.87 | 0.00 | A |
| PDX | Os07g0100200 | 3.61 | 0.00 | 1.77 | 0.00 | |
| Cytochrome P450 | Os01g0804400 | 3.61 | 0.00 | 1.10 | 0.00 | |
| MERI5 | Os04g0604300 | 3.57 | 0.00 | 1.41 | 0.00 | |
| Homeobox | Os06g0317200 | 3.33 | 0.00 | −1.97 | 0.00 | |
| Pectin acetylesterase | Os01g0319000 | 3.24 | 0.00 | −1.50 | 0.00 | |
| bZIP | Os02g0191600 | 3.20 | 0.00 | −1.73 | 0.00 | |
| Lipid transfer protein | Os12g0115000 | 3.08 | 0.00 | 1.76 | 0.00 | |

Genes up-regulated in GOS2: OsNAC5 plants

| | | | | | | |
|---|---|---|---|---|---|---|
| Glutathione S-transferase | Os09g0367700 | 1.30 | 0.00 | 10.26 | 0.00 | A, D, S |
| Serine/threonine protein kinase | Os03g0269300 | 1.51 | 0.00 | 8.70 | 0.00 | |
| WRKY | Os03g0335200 | 1.18 | 0.00 | 7.56 | 0.00 | |
| Heavy metal transport/detoxification protein | Os04g0464100 | 1.20 | 0.00 | 6.78 | 0.00 | |
| Stress response protein | Os01g0959100 | −1.09 | 0.00 | 4.76 | 0.00 | C, D, S |
| Auxin efflux carrier | Os08g0529000 | 1.19 | 0.00 | 4.52 | 0.00 | |
| Subtilase | Os02g0270200 | 1.93 | 0.00 | 4.41 | 0.00 | |
| UDP-glucuronosyl/UDP-glucosyltransferase | Os01g0638000 | 1.23 | 0.00 | 4.59 | 0.00 | A, S |
| Disease resistance protein | Os06g0279900 | −2.53 | 0.00 | 4.84 | 0.00 | |
| Nitrate reductase | Os02g0770800 | −1.26 | 0.00 | 4.85 | 0.00 | C |
| Heat shock protein | Os01g0606900 | 1.66 | 0.00 | 4.44 | 0.00 | A, D, S |
| Phosphoenolpyruvate carboxykinase | Os10g0204400 | 1.28 | 0.00 | 3.29 | 0.00 | |
| Xyloglucan endotransglycosylase | Os02g0280300 | −2.13 | 0.00 | 3.95 | 0.00 | |
| Isopenicillin N synthase | Os05g0560900 | 1.98 | 0.00 | 3.25 | 0.00 | |
| Zinc finger | Os03g0820300 | 1.61 | 0.00 | 3.44 | 0.00 | D, S |
| Serine/threonine protein kinase | Os09g0418000 | 1.60 | 0.00 | 3.07 | 0.00 | A |
| ATPase | Os03g0584400 | 1.38 | 0.00 | 3.62 | 0.00 | |
| Malic enzyme | Os05g0186300 | 1.88 | 0.00 | 3.06 | 0.00 | |

### SEQ ID NO:s for the Sequences in Table B Above

| | | |
|---|---|---|
| gene | Loc No | SEQ ID NO: |

Genes up-regulated in both RCc3: OsNAC5 and GOS2: OsNAC5 plants

| | | | |
|---|---|---|---|
| 1 | Calcium-transporting ATPase | Os10g0418100 | SEQ ID NO: 213 & 214 |
| 2 | Oxo-phytodienoic acid reductase | Os06g0215900 | SEQ ID NO: 215 & 216 |
| 3 | Cinnamoyl-CoA reductase | Os02g0811800 | SEQ ID NO: 217 & 218 |
| 4 | Chitinase | Os11g0701500 | SEQ ID NO: 219 & 220 |
| 5 | Cytochrome P450 | Os12g0150200 | SEQ ID NO: 221 & 222 |
| 6 | CBS protein | Os02g0639300 | SEQ ID NO: 223 & 224 |
| 7 | Sulfotransferase | Os01g0311600 | SEQ ID NO: 225 & 226 |
| 8 | Aminotransferase | Os05g0244700 | SEQ ID NO: 227 & 228 |
| 9 | Chitinase | Os11g0701000 | SEQ ID NO: 229 & 230 |
| 10 | Multicopper oxidase | Os01g0127000 | SEQ ID NO: 231 & 232 |
| 11 | Nicotianamine synthase | Os07g0689600 | SEQ ID NO: 233 & 234 |
| 12 | Pathogenesis-related transcriptional factor | Os07g0674800 | SEQ ID NO: 235 & 236 |
| 13 | Cinnamoyl-CoA reductase | Os02g0808800 | SEQ ID NO: 237 & 238 |
| 14 | Cinnamyl alcohol dehydrogenase | Os04g0612700 | SEQ ID NO: 239 & 240 |
| 15 | ZIM | Os03g0180900 | SEQ ID NO: 241 & 242 |
| 16 | Glycoside hydrolase | Os05g0247800 | SEQ ID NO: 243 & 244 |
| 17 | Glutathione-S-transferase | Os10g0530500 | SEQ ID NO: 245 & 246 |
| 18 | Iron-phytosiderophore transporter | Os02g0649900 | SEQ ID NO: 247 & 248 |
| 19 | Aminotransferase | Os01g0729600 | SEQ ID NO: 249 & 250 |
| 20 | Oxidase | Os06g0548200 | SEQ ID NO: 251 & 252 |
| 21 | Disease resistance response protein | Os07g0643800 | SEQ ID NO: 253 & 254 |
| 22 | WRKY | Os06g0649000 | SEQ ID NO: 255 & 256 |
| 23 | Acyltransferase | Os03g0245700 | SEQ ID NO: 257 & 258 |
| 24 | Pyruvate kinase | Os04g0677300 | SEQ ID NO: 259 & 260 |
| 25 | Oxidative stress response protein | Os03g0830500 | SEQ ID NO: 261 & 262 |

Genes up-regulated in RCc3: OsNAC5 plants

| | | | |
|---|---|---|---|
| 1 | GLP | Os03g0694000 | SEQ ID NO: 263 & 264 |
| 2 | C4-dicarboxylate transporter | Os04g0574700 | SEQ ID NO: 265 & 266 |
| 3 | O-methyltransferase | Os10g0118200 | SEQ ID NO: 267 & 268 |
| 4 | Fructose-bisphosphate aldolase | Os08g0120600 | SEQ ID NO: 269 & 270 |
| 5 | O-methyltransferase | Os09g0344500 | SEQ ID NO: 271 & 272 |
| 6 | MtN | Os05g0426000 | SEQ ID NO: 273 & 274 |
| 7 | O-methyltransferase | Os10g0118000 | SEQ ID NO: 275 & 276 |
| 8 | Dehydration-responsive protein | Os11g0170900 | SEQ ID NO: 277 & 278 |
| 9 | Lipid transfer protein | Os01g0822900 | SEQ ID NO: 279 & 280 |
| 10 | Oxidase | Os03g0693900 | SEQ ID NO: 281 & 282 |
| 11 | Glutamine synthetase | Os03g0712800 | SEQ ID NO: 283 & 284 |
| 12 | Lipid transfer protein | Os11g0115400 | SEQ ID NO: 285 & 286 |
| 13 | PDX | Os07g0100200 | SEQ ID NO: 287 & 288 |
| 14 | Cytochrome P450 | Os01g0804400 | SEQ ID NO: 289 & 290 |
| 15 | MERI5 | Os04g0604300 | SEQ ID NO: 291 & 292 |
| 16 | Homeobox | Os06g0317200 | SEQ ID NO: 293 & 294 |
| 17 | Pectin acetylesterase | Os01g0319000 | SEQ ID NO: 295 & 296 |
| 18 | bZIP | Os02g0191600 | SEQ ID NO: 297 & 298 |
| 19 | Lipid transfer protein | Os12g0115000 | SEQ ID NO: 299 & 300 |

Genes up-regulated in GOS2: OsNAC5 plants

| | | | |
|---|---|---|---|
| 1 | Glutathione S-transferase | Os09g0367700 | SEQ ID NO: 301 & 302 |
| 2 | Serine/threonine protein kinase | Os03g0269300 | SEQ ID NO: 303 & 304 |
| 3 | WRKY | Os03g0335200 | SEQ ID NO: 305 & 306 |
| 4 | Heavy metal transport/detoxification | Os04g0464100 | SEQ ID NO: 307 & 308 |
| | protein | | |
| 5 | Stress response protein | Os01g0959100 | SEQ ID NO: 309 & 310 |
| 6 | Auxin efflux carrier | Os08g0529000 | SEQ ID NO: 311 & 312 |
| 7 | Subtilase | Os02g0270200 | SEQ ID NO: 313 & 314 |
| 8 | UDP-glucuronosyl/UDP-glucosyltrans- | Os01g0638000 | SEQ ID NO: 315 & 316 |
| | Ferase | | |
| 9 | Disease resistance protein | Os06g0279900 | SEQ ID NO: 317 & 318 |
| 10 | Nitrate reductase | Os02g0770800 | SEQ ID NO: 319 & 320 |
| 11 | Heat shock protein | Os01g0606900 | SEQ ID NO: 321 & 322 |
| 12 | Phosphoenolpyruvate carboxykinase | Os10g0204400 | SEQ ID NO: 323 & 324 |
| 13 | Xyloglucan endotransglycosylase | Os02g0280300 | SEQ ID NO: 325 & 326 |
| 14 | Isopenicillin N synthase | Os05g0560900 | SEQ ID NO: 327 & 328 |
| 15 | Zinc finger | Os03g0820300 | SEQ ID NO: 329 & 330 |
| 16 | Serine/threonine protein kinase | Os09g0418000 | SEQ ID NO: 331 & 332 |
| 17 | ATPase | Os03g0584400 | SEQ ID NO: 333 & 334 |
| 18 | Malic enzyme | Os05g0186300 | SEQ ID NO: 335 & 336 |

### Example 7

### Identification of Sequences Related to SEQ ID NO: 1, SEQ ID NO: 2, SEQ ID NO: 3 and SEQ ID NO: 4

[0427] Sequences (full length cDNA, ESTs or genomic) related to SEQ ID NO: 1 and SEQ ID NO: 2 were identified amongst those maintained in the Entrez Nucleotides database at the National Center for Biotechnology Information (NCBI) using database sequence search tools, such as the Basic Local Alignment Tool (BLAST) (Altschul et al. (1990) J. Mol. Biol. 215:403-410; and Altschul et al. (1997) Nucleic Acids Res. 25:3389-3402). The program is used to find regions of local similarity between sequences by comparing nucleic acid or polypeptide sequences to sequence databases and by calculating the statistical significance of matches. For example, the polypeptide encoded by the nucleic acid of SEQ ID NO: 1 was used for the TBLASTN algorithm, with default settings and the filter to ignore low complexity sequences set off. The output of the analysis was viewed by pairwise comparison, and ranked according to the probability score (E-value), where the score reflect the probability that a particular alignment occurs by chance (the lower the E-value, the more significant the hit). In addition to E-values, comparisons were also scored by percentage identity. Percentage identity refers to the number of identical nucleotides (or amino acids) between the two compared nucleic acid (or polypeptide) sequences over a particular length. In some instances, the default parameters may be adjusted to modify the stringency of the search. For example the E-value may be increased to show less stringent matches. This way, short nearly exact matches may be identified.

TABLE C
NAC1 (SEQ ID NO: 22 to SEQ ID NO: 35) and NAC5 (SEQ ID NO:
36 to SEQ ID NO: 47) nucleic acids and polypeptides:

| | Nucleic acid | Protein |
|---|---|---|
| Plant Source | SEQ ID NO: | SEQ ID NO: |
| Phyllostachys edulis | SEQ ID NO: 22 | SEQ ID NO: 23 |
| Sorghum bicolour | SEQ ID NO: 24 | SEQ ID NO: 25 |
| Zea mays | SEQ ID NO: 26 | SEQ ID NO: 27 |
| Triticum aestivum | SEQ ID NO: 28 | SEQ ID NO: 29 |
| Hordeum vulgare | SEQ ID NO: 30 | SEQ ID NO: 31 |
| Eleusine coracana | SEQ ID NO: 32 | SEQ ID NO: 33 |
| Vitis vinifera | SEQ ID NO: 34 | SEQ ID NO: 35 |
| Phyllostachys edulis | SEQ ID NO: 36 | SEQ ID NO: 37 |
| Hordeum vulgare | SEQ ID NO: 38 | SEQ ID NO: 39 |
| Sorghum bicolour | SEQ ID NO: 40 | SEQ ID NO: 41 |
| Zea mays | SEQ ID NO: 42 | SEQ ID NO: 43 |
| Vitis vinifera | SEQ ID NO: 44 | SEQ ID NO: 45 |
| Populus trichocarpa | SEQ ID NO: 46 | SEQ ID NO: 47 |

[0428] Sequences have been tentatively assembled and publicly disclosed by research institutions, such as The Institute for Genomic Research (TIGR; beginning with TA). For instance, the Eukaryotic Gene Orthologs (EGO) database may be used to identify such related sequences, either by keyword search or by using the BLAST algorithm with the nucleic acid sequence or polypeptide sequence of interest. Special nucleic acid sequence databases have been created for particular organisms, e.g. for certain prokaryotic organisms, such as by the Joint Genome Institute. Furthermore, access to proprietary databases, has allowed the identification of novel nucleic acid and polypeptide sequences.

### Example 8

### Alignment of NCG Polypeptide Sequences

[0429] Alignment of the polypeptide sequences was performed using the ClustalW 2.0 algorithm of progressive alignment (Thompson et al. (1997) Nucleic Acids Res 25:4876-4882; Chenna et al. (2003). Nucleic Acids Res 31:3497-3500) with standard setting (slow alignment, similarity matrix: Gonnet, gap opening penalty 10, gap extension penalty: 0.2). Minor manual editing was done to further optimise the alignment. See FIGS. 9 and 10.

### Example 9

### Calculation of Global Percentage Identity Between Polypeptide Sequences

[0430] Global percentages of similarity and identity between full length polypeptide sequences useful in performing the methods of the invention is determined using MatGAT (Matrix Global Alignment Tool) software (BMC Bioinformatics. 2003 4:29. MatGAT: an application that generates similarity/identity matrices using protein or DNA sequences. Campanella J J, Bitincka L, Smalley J; software hosted by Ledion Bitincka). MatGAT generates similarity/identity matrices for DNA or protein sequences without needing pre-alignment of the data. The program performs a series of pair-wise alignments using the Myers and Miller global alignment algorithm, calculates similarity and identity, and then places the results in a distance matrix.

[0431] A MATGAT table based on subsequences of a specific domain is generated, which can be based on a multiple alignment of NUG polypeptides. Conserved sequences are selected for MaTGAT analysis. This approach is useful where overall sequence conservation among NUG proteins is rather low.

### Example 10

### Identification of Domains Comprised in Polypeptide Sequences Useful in Performing the Methods of the Invention

[0432] The Integrated Resource of Protein Families, Domains and Sites (InterPro) database is an integrated interface for the commonly used signature databases for text- and sequence-based searches. The InterPro database combines these databases, which use different methodologies and varying degrees of biological information about well-characterized proteins to derive protein signatures. Collaborating databases include SWISS-PROT, PROSITE, TrEMBL, PRINTS, ProDom and Pfam, Smart and TIGRFAMs. Pfam is a large collection of multiple sequence alignments and hidden Markov models covering many common protein domains and families. Pfam is hosted at the Sanger Institute server in the United Kingdom. Interpro is hosted at the European Bioinformatics Institute in the United Kingdom.

### Example 11

### Topology Prediction of the NCG Polypeptide Sequences

[0433] TargetP 1.1 predicts the subcellular location of eukaryotic proteins. The location assignment is based on the predicted presence of any of the N-terminal pre-sequences: chloroplast transit peptide (cTP), mitochondrial targeting peptide (mTP) or secretory pathway signal peptide (SP). Scores on which the final prediction is based are not really probabilities, and they do not necessarily add to one. However, the location with the highest score is the most likely according to TargetP, and the relationship between the scores (the reliability class) may be an indication of how certain the prediction is. The reliability class (RC) ranges from 1 to 5, where 1 indicates the strongest prediction. For the sequences predicted to contain an N-terminal presequence a potential cleavage site can also be predicted. TargetP is maintained at the server of the Technical University of Denmark.

[0434] A number of parameters are selected before analysing a sequence: such as organism group (non-plant or plant), cutoff sets (none, predefined set of cutoffs, or user-specified set of cutoffs), and the calculation of prediction of cleavage sites (yes or no).

[0435] Many other algorithms can be used to perform such analyses, including:
[0436] ChloroP 1.1 hosted on the server of the Technical University of Denmark;
[0437] Protein Prowler Subcellular Localisation Predictor version 1.2 hosted on the server of the Institute for Molecular Bioscience, University of Queensland, Brisbane, Australia;
[0438] PENCE Proteome Analyst PA-GOSUB 2.5 hosted on the server of the University of Alberta, Edmonton, Alberta, Canada;
[0439] TMHMM, hosted on the server of the Technical University of Denmark
[0440] PSORT (URL: psort.org)
[0441] PLOC (Park and Kanehisa, Bioinformatics, 19, 1656-1663, 2003).

### Example 12

### Transformation of Other Crops

### Corn Transformation

[0442] Transformation of maize (Zea mays) is performed with a modification of the method described by Ishida et al. (1996) Nature Biotech 14(6): 745-50. Transformation is genotype-dependent in corn and only specific genotypes are amenable to transformation and regeneration. The inbred line A188 (University of Minnesota) or hybrids with A188 as a parent are good sources of donor material for transformation, but other genotypes can be used successfully as well. Ears are harvested from corn plant approximately 11 days after pollination (DAP) when the length of the immature embryo is about 1 to 1.2 mm. Immature embryos are cocultivated with Agrobacterium tumefaciens containing the expression vector, and transgenic plants are recovered through organogenesis. Excised embryos are grown on callus induction medium, then maize regeneration medium, containing the selection agent (for example imidazolinone but various selection markers can be used). The Petri plates are incubated in the light at 25° C. for 2-3 weeks, or until shoots develop. The green shoots are transferred from each embryo to maize rooting medium and incubated at 25° C. for 2-3 weeks, until roots develop. The rooted shoots are transplanted to soil in the greenhouse. T1 seeds are produced from plants that exhibit tolerance to the selection agent and that contain a single copy of the T-DNA insert.

### Wheat Transformation

[0443] Transformation of wheat is performed with the method described by Ishida et al. (1996) Nature Biotech 14(6): 745-50. The cultivar Bobwhite (available from CIMMYT, Mexico) is commonly used in transformation. Immature embryos are co-cultivated with Agrobacterium tumefaciens containing the expression vector, and transgenic plants are recovered through organogenesis. After incubation with Agrobacterium, the embryos are grown in vitro on callus induction medium, then regeneration medium, containing the selection agent (for example imidazolinone but various selection markers can be used). The Petri plates are incubated in the light at 25° C. for 2-3 weeks, or until shoots develop. The green shoots are transferred from each embryo to rooting medium and incubated at 25° C. for 2-3 weeks, until roots develop. The rooted shoots are transplanted to soil in the greenhouse. T1 seeds are produced from plants that exhibit tolerance to the selection agent and that contain a single copy of the T-DNA insert.

### Soybean Transformation

[0444] Soybean is transformed according to a modification of the method described in the Texas A&M patent U.S. Pat. No. 5,164,310. Several commercial soybean varieties are amenable to transformation by this method. The cultivar Jack (available from the Illinois Seed foundation) is commonly used for transformation. Soybean seeds are sterilised for in vitro sowing. The hypocotyl, the radicle and one cotyledon are excised from seven-day old young seedlings. The epicotyl and the remaining cotyledon are further grown to develop axillary nodes. These axillary nodes are excised and incubated with Agrobacterium tumefaciens containing the expression vector. After the cocultivation treatment, the explants are washed and transferred to selection media. Regenerated shoots are excised and placed on a shoot elongation medium. Shoots no longer than 1 cm are placed on rooting medium until roots develop. The rooted shoots are transplanted to soil in the greenhouse. T1 seeds are produced from plants that exhibit tolerance to the selection agent and that contain a single copy of the T-DNA insert.

### Rapeseed/Canola Transformation

[0445] Cotyledonary petioles and hypocotyls of 5-6 day old young seedling are used as explants for tissue culture and transformed according to Babic et al. (1998, Plant Cell Rep 17: 183-188). The commercial cultivar Westar (Agriculture Canada) is the standard variety used for transformation, but other varieties can also be used. Canola seeds are surface-sterilized for in vitro sowing. The cotyledon petiole explants with the cotyledon attached are excised from the in vitro seedlings, and inoculated with Agrobacterium (containing the expression vector) by dipping the cut end of the petiole explant into the bacterial suspension. The explants are then cultured for 2 days on MSBAP-3 medium containing 3 mg/l BAP, 3% sucrose, 0.7 Phytagar at 23° C., 16 hr light. After two days of co-cultivation with Agrobacterium, the petiole explants are transferred to MSBAP-3 medium containing 3 mg/l BAP, cefotaxime, carbenicillin, or timentin (300 mg/l) for 7 days, and then cultured on MSBAP-3 medium with cefotaxime, carbenicillin, or timentin and selection agent until shoot regeneration. When the shoots are 5-10 mm in length, they are cut and transferred to shoot elongation medium (MSBAP-0.5, containing 0.5 mg/l BAP). Shoots of about 2 cm in length are transferred to the rooting medium (MS0) for root induction. The rooted shoots are transplanted to soil in the greenhouse. T1 seeds are produced from plants that exhibit tolerance to the selection agent and that contain a single copy of the T-DNA insert.

Alfalfa Transformation A regenerating clone of alfalfa (Medicago sativa) is transformed using the method of (McKersie et al., 1999 Plant Physiol 119: 839-847). Regeneration and transformation of alfalfa is genotype dependent and therefore a regenerating plant is required. Methods to obtain regenerating plants have been described. For example, these can be selected from the cultivar Rangelander (Agriculture Canada) or any other commercial alfalfa variety as described by Brown DCW and A Atanassov (1985. Plant Cell Tissue Organ Culture 4: 111-112). Alternatively, the RA3 variety (University of Wisconsin) has been selected for use in tissue culture (Walker et al., 1978 Am J Bot 65:654-659). Petiole explants are cocultivated with an overnight culture of Agrobacterium tumefaciens C58C1 pMP90 (McKersie et al., 1999 Plant Physiol 119: 839-847) or LBA4404 containing the expression vector. The explants are cocultivated for 3 d in the dark on SH induction medium containing 288 mg/L Pro, 53 mg/L thioproline, 4.35 g/L K2504, and 100 μm acetosyringinone. The explants are washed in half-strength Murashige-Skoog medium (Murashige and Skoog, 1962) and plated on the same SH induction medium without acetosyringinone but with a suitable selection agent and suitable antibiotic to inhibit Agrobacterium growth. After several weeks, somatic embryos are transferred to BOi2Y development medium containing no growth regulators, no antibiotics, and 50 g/L sucrose. Somatic embryos are subsequently germinated on half-strength Murashige-Skoog medium. Rooted seedlings were transplanted into pots and grown in a greenhouse. T1 seeds are produced from plants that exhibit tolerance to the selection agent and that contain a single copy of the T-DNA insert.

### Cotton Transformation

[0446] Cotton is transformed using Agrobacterium tumefaciens according to the method described in U.S. Pat. No. 5,159,135. Cotton seeds are surface sterilised in 3% sodium hypochlorite solution during 20 minutes and washed in distilled water with 500 μg/ml cefotaxime. The seeds are then transferred to SH-medium with 50 μg/ml benomyl for germination. Hypocotyls of 4 to 6 days old seedlings are removed, cut into 0.5 cm pieces and are placed on 0.8% agar. An Agrobacterium suspension (approx. 108 cells per ml, diluted from an overnight culture transformed with the gene of interest and suitable selection markers) is used for inoculation of the hypocotyl explants. After 3 days at room temperature and lighting, the tissues are transferred to a solid medium (1.6 g/l Gelrite) with Murashige and Skoog salts with B5 vitamins (Gamborg et al., Exp. Cell Res. 50:151-158 (1968)), 0.1 mg/l 2,4-D, 0.1 mg/l 6-furfurylaminopurine and 750 μg/ml MgCL2, and with 50 to 100 μg/ml cefotaxime and 400-500 μg/ml carbenicillin to kill residual bacteria. Individual cell lines are isolated after two to three months (with subcultures every four to six weeks) and are further cultivated on selective medium for tissue amplification (30° C., 16 hr photoperiod). Transformed tissues are subsequently further cultivated on non-selective medium during 2 to 3 months to give rise to somatic embryos. Healthy looking embryos of at least 4 mm length are transferred to tubes with SH medium in fine vermiculite, supplemented with 0.1 mg/l indole acetic acid, 6 furfurylaminopurine and gibberellic acid. The embryos are cultivated at 30° C. with a photoperiod of 16 hrs, and plantlets at the 2 to 3 leaf stage are transferred to pots with vermiculite and nutrients. The plants are hardened and subsequently moved to the greenhouse for further cultivation.

### Sugarbeet Transformation

[0447] Seeds of sugarbeet (Beta vulgaris L.) are sterilized in 70% ethanol for one minute followed by 20 min. shaking in 20% Hypochlorite bleach e.g. Clorox® regular bleach (commercially available from Clorox, 1221 Broadway, Oakland, Calif. 94612, USA). Seeds are rinsed with sterile water and air dried followed by plating onto germinating medium (Murashige and Skoog (MS) based medium (Murashige, T., and Skoog., 1962. Physiol. Plant, vol. 15, 473-497) including B5 vitamins (Gamborg et al.; Exp. Cell Res., vol. 50, 151-8.) supplemented with 10 g/l sucrose and 0.8% agar). Hypocotyl tissue is used essentially for the initiation of shoot cultures according to Hussey and Hepher (Hussey, G., and Hepher, A., 1978. Annals of Botany, 42, 477-9) and are maintained on MS based medium supplemented with 30 g/l sucrose plus 0.25 mg/l benzylamino purine and 0.75% agar, pH 5.8 at 23-25° C. with a 16-hour photoperiod. Agrobacterium tumefaciens strain carrying a binary plasmid harbouring a selectable marker gene, for example nptII, is used in transformation experiments. One day before transformation, a liquid LB culture including antibiotics is grown on a shaker (28° C., 150 rpm) until an optical density (O.D.) at 600 nm of ˜1 is reached. Overnight-grown bacterial cultures are centrifuged and resuspended in inoculation medium (O.D. ˜1) including Acetosyringone, pH 5.5. Shoot base tissue is cut into slices (1.0 cm×1.0 cm×2.0 mm approximately). Tissue is immersed for 30s in liquid bacterial inoculation medium. Excess liquid is removed by filter paper blotting. Co-cultivation occurred for 24-72 hours on MS based medium incl. 30 g/l sucrose followed by a non-selective period including MS based medium, 30 g/l sucrose with 1 mg/l BAP to induce shoot development and cefotaxim for eliminating the Agrobacterium. After 3-10 days explants are transferred to similar selective medium harbouring for example kanamycin or G418 (50-100 mg/l genotype dependent). Tissues are transferred to fresh medium every 2-3 weeks to maintain selection pressure. The very rapid initiation of shoots (after 3-4 days) indicates regeneration of existing meristems rather than organogenesis of newly developed transgenic meristems. Small shoots are transferred after several rounds of subculture to root induction medium containing 5 mg/l NAA and kanamycin or G418. Additional steps are taken to reduce the potential of generating transformed plants that are chimeric (partially transgenic). Tissue samples from regenerated shoots are used for DNA analysis. Other transformation methods for sugarbeet are known in the art, for example those by Linsey & Gallois (Linsey, K., and Gallois, P., 1990. Journal of Experimental Botany; vol. 41, No. 226; 529-36) or the methods published in the international application published as WO9623891A.

### Sugarcane Transformation

[0448] Spindles are isolated from 6-month-old field grown sugarcane plants (Arencibia et al., 1998. Transgenic Research, vol. 7, 213-22; Enriquez-Obregon et al., 1998. Planta, vol. 206, 20-27). Material is sterilized by immersion in a 20% Hypochlorite bleach e.g. Clorox® regular bleach (commercially available from Clorox, 1221 Broadway, Oakland, Calif. 94612, USA) for 20 minutes. Transverse sections around 0.5 cm are placed on the medium in the top-up direction. Plant material is cultivated for 4 weeks on MS (Murashige, T., and Skoog., 1962. Physiol. Plant, vol. 15, 473-497) based medium incl. B5 vitamins (Gamborg, O., et al., 1968. Exp. Cell Res., vol. 50, 151-8) supplemented with 20 g/l sucrose, 500 mg/l casein hydrolysate, 0.8% agar and 5 mg/l 2,4-D at 23° C. in the dark. Cultures are transferred after 4 weeks onto identical fresh medium. Agrobacterium tumefaciens strain carrying a binary plasmid harbouring a selectable marker gene, for example hpt, is used in transformation experiments. One day before transformation, a liquid LB culture including antibiotics is grown on a shaker (28° C., 150 rpm) until an optical density (O.D.) at 600 nm of ˜0.6 is reached. Overnight-grown bacterial cultures are centrifuged and resuspended in MS based inoculation medium (O.D. ˜0.4) including acetosyringone, pH 5.5. Sugarcane embryogenic callus pieces (2-4 mm) are isolated based on morphological characteristics as compact structure and yellow colour and dried for 20 min. in the flow hood followed by immersion in a liquid bacterial inoculation medium for 10-20 minutes. Excess liquid is removed by filter paper blotting. Co-cultivation occurred for 3-5 days in the dark on filter paper which is placed on top of MS based medium incl. B5 vitamins containing 1 mg/l 2,4-D. After co-cultivation calli are washed with sterile water followed by a non-selective cultivation period on similar medium containing 500 mg/l cefotaxime for eliminating remaining Agrobacterium cells. After 3-10 days explants are transferred to MS based selective medium incl. B5 vitamins containing 1 mg/l 2,4-D for another 3 weeks harbouring 25 mg/l of hygromycin (genotype dependent). All treatments are made at 23° C. under dark conditions. Resistant calli are further cultivated on medium lacking 2,4-D including 1 mg/l BA and 25 mg/l hygromycin under 16 h light photoperiod resulting in the development of shoot structures. Shoots are isolated and cultivated on selective rooting medium (MS based including, 20 g/l sucrose, 20 mg/l hygromycin and 500 mg/l cefotaxime). Tissue samples from regenerated shoots are used for DNA analysis. Other transformation methods for sugarcane are known in the art, for example from the in-ternational application published as WO2010/151634A and the granted European patent EP1831378.

### REFERENCES

[0449] Clark, L. J., Price, A. H., Steel, K. A. and Whaley, W. R. (2008) Evidence from near-isogenic lines that root penetration increases with root diameter and bending stiffness in rice. Funct Plant Biol 35: 1163-1171.
[0450] Cai, X., Chen, T., Zhou, Q. Y., Xu, L., Qu, L. Q., Hua, X. J. and Lin, J. X. (2011) Development of casparian strip in rice cultivars. Plant Sig & Behavior 6: 59-65.
[0451] de Pater, B. S., van der Mark, F., Rueb, S., Katagiri, F., Chua, N. H., Schilperoort, R. A. and Hensgens, L. S. (1992) The promoter of the rice gene GOS2 is active in various different monocot tissues and bind rice nuclear factor ASF-1. Plant J 2: 837-844.
[0452] Drew, M. C., He, C. J. and Morgan, P. W. (2000) Programmed cell death and aerenchyma formation in roots. Trends Plant Sci 5:123-127.
[0453] Ernst, E. A., Olsen, A. N., Skriver, K., Larsen, S. and Leggio, L. L. (2004) Structure of the conserved domain of ANAC, a member of the NAC family of transcription factors. EMBO Rep 5:297-303.
[0454] Fan, L., Linker, R., Gepstein, S., Tanimoto, E., Yamamoto, R. and Neumann, P. M. (2006) Progressive inhibition by water deficit of cell wall extensibility and growth along the elongation zone of maize roots is related to increased lignin metabolism and progressive stelar accumulation of wall phenolics. Plant Physiol 140: 603-612.
[0455] Fitter, A. H. (1991) The ecological significance of root system architecture: an economic approach. In: Plant Root Growth: An Ecological Perspective. Blackwell Scientific Publishers, London.
[0456] Goujon, T., Ferret, V., Mila, I., Pollet, B., Ruel, K., Burlat, V., Joseleau, J. P., Barrière, Y., Lapierre, C., Jounanin, L. (2003) Down-regulation of the AtCCR1 gene in Arabidopsis thaliana: effects on phenotype, lignins and cell wall degradability. Plana 217: 218-228
[0457] Hegedus, D., Yu, M., Baldwin, D., Gruber, M., Sharpe, A., Parkin, I., Whitwill, S. and Lydiate, D. (2003) Molecular characterization of Brassica napus NAC domain transcriptional activators induced in response to biotic and abiotic stress. Plant Mol Biol 53: 383-397.
[0458] Held, B. M., Wang, H., John, I., Wurtele, E. S. and Colbert, J. T. (1993) An mRNA putatively coding for an o-methyltransferase accumulates preferentially in maize roots and is located predominantly in the region of the endodermis. Plant Physiol 102: 1001-1008.
[0459] Ingram, K. T., Bueno, F. D., Namuco, O. S., Yambao, E. B. and Beyrouty, C. A. (1994) Rice root traits for drought resistance and their genetic variation. In: Kirk G J D (Ed.), Rice Roots: Nutrient and Water Use. International Rice Research Institute, Manila, Philippines.
[0460] Jang, I. C., Choi, W. B., Lee, K. H., Song, S. K., Nahm, B. K. and Kim, J. K. (2002) High-level and ubiquitous expression of the rice cytochrome c gene OsCc1 and its promoter activity in transgenic plants provides a useful promoter for transgenesis of monocots. Plant Physiol 129: 1473-1481.
[0461] Jang, I. C., Nahm, B. H. and Kim, J. K. (1999) Subcellular targeting of green fluorescent protein to plastids in transgenic rice plants provides a high-level expression system. Mol Breed 5: 453-461.
[0462] Jeong, J. S., Park, Y. T., Jung, H., Park, S. H. and Kim, J. K. (2009) Rice NAC proteins act as homodimers and heterodimers. Plant Biotechonol Rep 3: 127-134.
[0463] Jeong, J. S., Kim, Y. S., Baek, K. H., Jung, H., Ha, S. H., Choi, Y. D., Kim, M., Reuzeau, C. and Kim, J. K. (2010) Root-specific expression of OsNAC10 improves drought tolerance and grain yield in rice under field drought conditions. Plant Physiol 153: 185-197.
[0464] Jones, L. E., Ennos, A. R. and Turner, S. R. (2001) Cloning and characterization of irregular xylem4 (irx4); a severly lignin-dependent mutant of Arabidopsis. Plant J 26: 205-216.
[0465] Knight, H. (2000) Calcium signaling during abiotic stress in plants. Int Rev Cytol 195:269-325
[0466] Ma, F. and Peterson, C. A. (2003) Current insights into the development, structure and chemistry of the endodermis and exodermis of roots. Can J Bot 81: 404-421.
[0467] Nguyen, H. T., Babu, R. C. and Blum, A. (1997) Breeding for drought resistance in rice: Physiology and molecular considerations. Crop Sci 37: 1426-1434.
[0468] Oh, S. J., Song, S. I., Kim, Y. S., Jang, H. J., Kim, S. Y., Kim, M. J., Kim, Y. K., Nam, B. H. and Kim, J. K. (2005) Arabidopsis CBF3/DREB1A and ABF3 in Transgenic Rice Increased Tolerance to Abiotic Stress without Stunting Growth. Plant Physiol 138: 341-351.
[0469] Oh, S. J., Kim, Y. S., Kwon, C. W., Park, H. K., Jeong, J. S. and Kim, J. K. (2009) Overexpression of the transcription factor AP37 in rice improves grain yield under drought conditions. Plant Physiol 150: 1368-1379.
[0470] Redillas M C F, Strasser R J, Jeong J S, Kim Y S, Kim J K (2011a) The use of JIP test to evaluate drought-tolerance of transgenic rice overexpressing OsNAC10. Plant Biotechnol Rep 5: 169-175.
[0471] Redillas M C F, Jeong J S, Strasser R J, Kim Y S, Kim J K (2011b) JIP analysis on rice (Oryza sativa cv Nipponbare) grown under limited nitrogen conditions. J Kor Soc Appl Biol Chem, doi: 10.3839.
[0472] Sattler, S. E., Saathoff, A. J., Haas, E. J., Palmer, N. A., Funnell-Harris, D. L., Sarath, G. and Pedersen, J. F. (2009) A nonsense mutation in a cinnamyl alcohol dehydrogenase gene is responsible for the Sorghum brown midrib6 phenotype. Plant Physiol 150: 584-595.
[0473] Takasaki, H., Maruyama, K., Kidokoro, S., I to, Y., Fujita, Y., Shinozaki, K., Yamaguchi-Shinozaki K. and Nakashima, K. (2010) The abiotic stress-responsive NAC-type transcription factor OsNAC5 regulates stress-inducible genes and stress tolerance in rice. Mol Genet Genomics 284: 173-183.
[0474] Tamasloukht, B., Lam, M. S. J. W. Q., Martinez, Y., Tozo, K., Barbier, O., Jourda, C., Jauneau, A., Borderies, G., Balzergue, S., Renou, J. P., Huguet, S., Martinant, J. P., Tatout, C., Lapierre, C., Barrière, Y., Goffner, D. and Pichon, M. (2011) Characterization of cinnamoyl-CoA reductase 1 (CCR1) mutant in maize: effect of lignification, fibre development, and global gene expression. J Exp Bot 62: 3837-3848.
[0475] Tan, B. C., Schwartz, S. H., Zeevart, J. A. D. and McCarty, D. R. (1997) Genetic control of abscisic acid biosynthesis in maize. Proc Natl Acad Sci USA 94: 12235-12240.
[0476] Titiz O, Tambasco-Studart M, Warzych E, Apel K, Amrhein N, Laloi C, Fitzpatrick T B (2006) PDX1 is essential for vitamin B6 biosynthesis, development and stress tolerance in Arabidopsis. Plant J 48: 933-946.
[0477] Verica J A and Medford J I (1997) Modified MERI5 expression alters cell expansion in transgenic Arabidopsis plants. Plant Science 125: 301-210
[0478] Xie, Q., Frugis, G., Colgan, D. and Chua, N. H. (2000) Arabidopsis NAC1 transduces auxin signal downstream of TIR1 to promote lateral root development. Genes Dev 14: 3024-3036.
[0479] Xu, Y., Buchholz, W. G., DeRose, R. T. and Hall, T. C. (1995) Characterization of a rice gene family encoding root-specific proteins. Plant Mol Biol 27: 237-248.
[0480] Yambao, E. B., Ingram, K. T. and Real, J. G. (1992) Root xylem influence on the water relations and drought resistance in rice. J Exp Bot 43: 925-932.
[0481] Yin K, Han X, Xu Z, Xue H (2009) Arabidopsis GLP4 is localized to the Golgi and binds auxin in vitro. Acta Biochim Biophys Sin 41: 478-487.
[0482] Zheng, X. N., Chen. B., Lu, G. J. and Han, B. (2009) Overexpression of a NAC transcription factor enhances rice drought and salt tolerance. Biochem Biophys Res Commun 379: 985-989.
[0483] Zhu J, Brown K M, Lynch J P (2010) Root cortical aerenchyma improves the drought tolerance of maize (Zea mays L.). Plant Cell Environ 33: 740-749.

1. A method for enhancing yield-related traits and/or modifying root architecture in plants grown under abiotic stress conditions, comprising introducing and expressing in a plant a nucleic acid encoding a NAC5 polypeptide represented by SEQ ID NO 4 or a NAC1 polypeptide represented by SEQ ID NO: 2, or a homologue thereof having at least 50% sequence identity to SEQ ID NO: 4 or SEQ ID NO: 2.

2. The method according to claim 1, wherein said nucleic acid is operably linked to a tissue-specific promoter, a root-specific promoter, an RCc3 promoter, or RCc3 promoter from rice.

3. The method according to claim 1, wherein said nucleic acid is operably linked to a constitutive promoter, a GOS2 promoter, or an GOS2 promoter from rice.

4. The method according to claim 1, wherein said enhanced yield-related traits comprise increased seed or grain yield.

5. The method according to claim 1, to wherein said modified root architecture comprises or is due to an increase or change in any one or more of the following: an increase in root biomass in the form of fresh weight or dry weight, increased number of roots, increased root diameter, enlarged roots, enlarged stele, enlarged aerenchyma, increased aerenchyma formation, enlarged cortex, enlarged cortical cells, enlarged xylem, modified branching, improved penetration ability, enlarged epidermis, increase in the ratio of roots to shoots.

6. The method according to claim 1, wherein said enhanced yield-related traits are obtained under conditions of drought stress or salt stress.

7. The method according to claim 1, wherein said NAC5 or NAC1 polypeptide comprises one or more of the motifs represented by SEQ ID NO: 5 to SEQ ID NO: 15.

8. The method according to claim 1, wherein said nucleic acid encoding a NAC5 or NAC1 is of plant origin, from a monocotyledonous plant, from a plant of the family Poaceae, from a plant of the genus Oryza, or from an Oryza sativa plant.

9. The method according to claim 1, wherein said nucleic acid encoding a NAC5 or NAC1 encodes any one of the polypeptides listed in Table C or is a portion of such a nucleic acid, or a nucleic acid capable of hybridising with such a nucleic acid.

10. The method according to claim 1, wherein said nucleic acid sequence encodes an orthologue, or paralogue of any of the polypeptides given in Table C.

11. The method according to claim 1, wherein said nucleic acid encodes the NAC5 polypeptide represented by SEQ ID NO: 4 or wherein said nucleic acid encodes the NAC1 polypeptide represented by SEQ ID NO: 2.

12. A plant or part thereof, or plant cell, obtainable by the method according to claim 1, wherein said plant, plant part or plant cell comprises a recombinant nucleic acid encoding a NAC5 polypeptide or a NAC1 polypeptide as given in Table C or a homologue, paralogue or orthologue thereof.

13. A construct comprising:
(i) a nucleic acid sequence encoding a NAC5 polypeptide or a NAC1 polypeptide as given in Table C or a homologue, paralogue or orthologue thereof;
(ii) one or more control sequences capable of driving expression of the nucleic acid sequence of (i) comprising at least a tissue-specific promoter; and optionally
(iii) a transcription termination sequence.

14. The construct according to claim 13, wherein said nucleic acid sequence is operably to a constitutive promoter of plant origin, a medium strength constitutive promoter of plant origin, a GOS2 promoter, or a GOS2 promoter from rice.

15. The construct according to claim 13, wherein said tissue-specific promoter is a root-specific promoter or an RCc3 promoter.

16. A method for making plants having enhanced yield-related traits, increased seed yield, increased biomass, and/or modified root architecture relative to control plants, comprising introducing the construction according to claim 13.

17. A plant, plant part or plant cell transformed with the construct according to claim 13.

18. A method for the production of a transgenic plant having enhanced yield-related traits increased seed yield, and/or increased biomass relative to control plants, comprising:
(i) introducing and expressing in a plant cell or plant a nucleic acid encoding a NAC1 or NAC5 polypeptide as given in Table C or a homologue, paralogue or orthologue thereof; and
(ii) cultivating said plant cell or plant from step (i) under abiotic stress conditions, wherein said plants have increased seed yield and modified root architecture.

19. The method according to claim 18, wherein said nucleic acid is operably linked to a tissue-specific promoter, a root-specific promoter, an RCc3 promoter, or an RCc3 promoter from rice.

20. The method according to claim 18, wherein said nucleic acid is operably linked to a constitutive promoter, a GOS2 promoter, or tan GOS2 promoter from rice.

21. A transgenic plant having enhanced yield related traits relative to control plants resulting from modulated expression of a nucleic acid encoding a NAC1 car NAC5 polypeptide as given in Table C or a homologue, paralogue or orthologue thereof.

22. The transgenic plant according to claim 21, or a transgenic plant cell derived therefrom, wherein said plant is a crop plant, a monocotyledonous plant or a cereal, or wherein said plant is beet, sugarbeet, alfalfa, sugarcane, maize, wheat, barley, millet, rye, triticale, sorghum, emmer, spelt, einkorn, teff, milo or oats.

23. Harvestable parts of the plant according to claim 22, wherein said harvestable parts are root biomass and/or seeds.

24. Products derived from the plant according to claim 22 and/or from harvestable parts of said plant.

25. (canceled)

26. A method for manufacturing a product, comprising the steps of growing the plant according to claim 12, and producing a product from or by said plant, or parts thereof, including seeds.

The application's sequence listing, which the Patent Office published only in electronic form, follows.

SEQUENCE LISTING (336 sequences)

SEQ ID NO: 1 - DNA, 1290 bp, Oryza sativa
ttgattcgagaaatccctcacaacccacaacattttcaaacaacgcaaagcagtagcagcagcgagaagcaagcaagaagcgatggggatgaggagggagagggacgcggaggcggagctgaacctgccgccggggttcaggttccaccccacggacgacgagctggtggagcactacctgtgcaggaaggcggcggggcagcgcctgccggtgccgatcatcgccgaggtggatctctacaagttcgacccgtgggatctgcccgagcgcgcgctgttcggcgccagggagtggtacttcttcaccccgcgggatcgcaagtatcccaatgggtcacgccccaaccgcgccgccggcaacgggtactggaaggccaccggcgccgacaagcccgtcgcgccgcgtgggcgcacgcttgggatcaagaaggcgctcgtgttctacgccggcaaggcgccgcgaggggtcaagactgattggatcatgcatgagtaccggctcgccgatgctggccgcgccgccgcgggcgccaagaagggatctctcaggttggatgattgggtgctgtgtcggctgtacaacaagaagaacgagtgggagaagatgcagcaggggaaggaggtgaaggaggaggcgtccgacatggttacgtcgcagtcgcactcgcacacccactcgtggggcgagacgcgcacgccggagtcggagatcgtggacaacgaccccttcccggagctggactcgttcccggcgttccagcctgcgccgccgccggcgacggcgatgatggtgcccaagaaagaatcgatggacgacgccaccgcggccgccgccgccgccgccaccatccccaggaacaacagcagcctgttcgtggacctgagctacgacgatatccagggcatgtacagcggcctcgacatgctgccgccgggcgacgacttctactcgtcgctcttcgcgtcgccgcgggtgaaggggacgacgccacgcgccggcgccggcatgggcatggtcccgttctgaggtgacggcgacgcgatcgaacaggtggtgatcgatgctgcaacgtgtgtaaatatacagcgccggctgggtcaagagatggctcgggtgacgcgcgcgcggcgtgtcctggcgttggcgccggggcattctttagtttttcatcttttcatcatctcagatggtagatacaaaacagtgtatgtatgtagctctgtttctctctatagaaccccaacaaattttgttgttgatgttgtttatcttcatatgctttgatcttg

SEQ ID NO: 2 - protein, 314 aa, Oryza sativa
MGMRRERDAEAELNLPPGFRFHPTDDELVEHYLCRKAAGQRLPVPIIAEVDLYKFDPWDLPERALFGAREWYFFTPRDRKYPNGSRPNRAAGNGYWKATGADKPVAPRGRTLGIKKALVFYAGKAPRGVKTDWIMHEYRLADAGRAAAGAKKGSLRLDDWVLCRLYNKKNEWEKMQQGKEVKEEASDMVTSQSHSHTHSWGETRTPESEIVDNDPFPELDSFPAFQPAPPPATAMMVPKKESMDDATAAAAAAATIPRNNSSLFVDLSYDDIQGMYSGLDMLPPGDDFYSSLFASPRVKGTTPRAGAGMGMVPF

SEQ ID NO: 3 - DNA, 1870 bp, Oryza sativa
attccaaaactttcgaaagcttccattagcgactaatccagccttcgttaagggtgattagaatttgattaatttcaaggcctcagatcggagattgaatggagtgcggtggtgcgctgcagctgccgccggggttcaggttccacccgacggacgacgagctggtgatgtactacctgtgccgcaagtgcggcggcctccccctcgccgccccggtgatcgccgaggtggacctctacaagttcaacccatgggatctccccgagagggcgatgggaggggagaaggagtggtacttcttctcgccgcgggaccggaagtacccgaacgggcagcggccgaacagggcggcggggacggggtactggaaggcgacgggggcggacaagccggtggggtcgccgcgggcggtggcgatcaagaaggcgctcgtcttctacgccgggaagccgcccaagggcgtcaagaccaactggatcatgcacgagtaccgcctcgccgacgtcgaccgctccgccgccgcccgcaagctctccaagtcctcccacaacgccctcaggttggatgattgggtgttgtgccgaatctacaacaagaagggagtgatcgagaggtacgacacggtggacgccggcgaggacgtgaagccggcggcggcggcggcggcggcgaagggtggtcgcatcggcggcggcggcggcgcggcggcgatgaaggtggagctctccgactatgggttctacgaccaggagccggagtcggagatgctgtgcttcgaccggtcggggtcggcggaccgcgactcgatgccgcggctgcacaccgactccagcgggtcggagcacgtgctgtcgccgtcgccgtcgccggacgacttccccggcggcggcgaccacgactacgccgagagccagcccagcggcggatgcggcgggtggcccggcgtcgactgggccgccgtcggcgacgatggcttcgtcatcgacagctccctcttcgagctgccctcgccggcggcgttctcccgcgccgccggcgacggcgccgccttcggcgacatgttcacgtacctgcagaagccgttctaattaacggaacgtgacgcctctgcaaacgctaattagctcactaaccactgtcaggtcgatcgtgtaattcttttaccagtctagggtacagccaaaaaaccaaaaattaaccgtgctcgatcgatcgatcgatccatggatcgatgatcgcctccaccggcagatcaaaatcgaagcaaaaaatcagggagaattcttggtacttccagtacctctcgtcgacaccacgtgtcgggttttctgcaccgcggatcctcgctggccgcatcgtaacggcgagcgaggttaaaaatagtggagaattcaagaacacatccctgatttttgtttctgccggatggggagtaccgtgagcatggtagaaatgactggtaaaattttcgttgatgataggtagccagagtcgatgtaaccagtcgattttttttttttttggttttagttgacatgccttcctgatagattcagaacaaacaatagagaagagaggagaaaaaaacacagaggagaaattcagagaccaaagttcaaagttttggaattttcaggggcgccagcagctgatggtattgtcagtcgtgtctaggttcgtagaggaaattaaaatgtagaagaacgggtacttcagttcacttcaggttcgttcgtgccaaacaggtctctgacactttagttaggttttgatttttttttctctttttttctggttttttgtcgtttggtaatgtaatgtaagggtgattgcgacatggtatttatgtgattagagtcgctttcagttg

SEQ ID NO: 4 - protein, 329 aa, Oryza sativa
MECGGALQLPPGFRFHPTDDELVMYYLCRKCGGLPLAAPVIAEVDLYKFNPWDLPERAMGGEKEWYFFSPRDRKYPNGQRPNRAAGTGYWKATGADKPVGSPRAVAIKKALVFYAGKPPKGVKTNWIMHEYRLADVDRSAAARKLSKSSHNALRLDDWVLCRIYNKKGVIERYDTVDAGEDVKPAAAAAAAKGGRIGGGGGAAAMKVELSDYGFYDQEPESEMLCFDRSGSADRDSMPRLHTDSSGSEHVLSPSPSPDDFPGGGDHDYAESQPSGGCGGWPGVDWAAVGDDGFVIDSSLFELPSPAAFSRAAGDGAAFGDMFTYLQKPF

SEQ ID NO: 5 - protein, 11 aa, Artificial sequence
  Motif 1
  VARIANT (1)..(1): Xaa can be Lys, Pro, Arg or Gly
  VARIANT (2)..(2): Xaa can be Ile, Ser or Met
  VARIANT (3)..(3): Xaa can be Asp or Ala
  VARIANT (4)..(4): Xaa can be Leu, Ile or Val
  VARIANT (6)..(6): Xaa can be Ile, Val or Phe
  VARIANT (8)..(8): Xaa can be Gln, Val, Arg or Lys
  VARIANT (9)..(9): Xaa can be Glu or Asp
  VARIANT (10)..(10): Xaa can be Leu, Ile or Val
XXXXDXIXXXD

SEQ ID NO: 6 - protein, 14 aa, Artificial sequence
  Motif 2
  VARIANT (2)..(2): Xaa can be Lys or Arg
  VARIANT (3)..(3): Xaa can be Tyr, Leu or Ile
  UNSURE (5)..(7): Xaa can be any naturally occurring amino acid
  VARIANT (8)..(8): /replace = "Tyr" /replace = "Asn"
  VARIANT (9)..(9): Xaa can be Asp or Glu
  VARIANT (11)..(11): Xaa can be Gly or Arg
  VARIANT (12)..(12): Xaa can be Thr, Asn or Ser
CXXGXXXXXEXXEW

SEQ ID NO: 7 - protein, 11 aa, Artificial sequence
  Motif 3
  VARIANT (7)..(7): Xaa can be Ala or Val
  misc_feature (8)..(8): Xaa can be any naturally occurring amino acid
  UNSURE (9)..(9): Xaa can be any naturally occurring amino acid, preferably Gln, Arg or Lys
  UNSURE (11)..(11): Xaa can be any naturally occurring amino acid, preferably Pro, Arg or Lys
GWVVCRAXXKX

SEQ ID NO: 8 - protein, 6 aa, Artificial sequence
  motif 4
  VARIANT (1)..(1): Xaa can be Ala, Pro, Ser or Asn
  VARIANT (2)..(2): Xaa can be Val, Leu, Ile or Ala
  VARIANT (3)..(3): Xaa can be Pro, Ser, Asp, Val or Gln
  VARIANT (4)..(4): Xaa can be Val or Ile
  VARIANT (6)..(6): Xaa can be a Ala, Thr or Ala
XXXXIX

SEQ ID NO: 9 - protein, 6 aa, Artificial sequence
  motif 5
  VARIANT (2)..(2): Xaa can be Gly or Ser
  VARIANT (3)..(3): Xaa can be Ser, Gln, Ala or Val
  VARIANT (6)..(6): Xaa can be Asn or Ser
NXXRPX

SEQ ID NO: 10 - protein, 7 aa, Artificial sequence
  motif 6
  VARIANT (1)..(1): Xaa can be Cys or Tyr
  VARIANT (2)..(2): Xaa can be Arg or Lys
  VARIANT (3)..(3): Xaa can be Leu or Ile
  VARIANT (4)..(4): Xaa can be Tyr, His or Phe
  VARIANT (5)..(5): Xaa can be Asn or Lys
  VARIANT (7)..(7): Xaa can be Lys, Asn, Cys, Ser or Thr
XXXXXKX

SEQ ID NO: 11 - protein, 7 aa, Artificial sequence
  motif 7
  VARIANT (2)..(2): Xaa can be Glu, Gln or Thr /replace="Gln" /replace="Thr"
  VARIANT (6)..(6): Xaa can be Val or Met
  VARIANT (7)..(7): Xaa can be Gln, Arg or Lys
NXWEKXX

SEQ ID NO: 12 - protein, 10 aa, Artificial sequence
  motif 8
  VARIANT (4)..(4): Xaa can be Thr or Ala
  VARIANT (10)..(10): Xaa can be Glu or Asp
WGEXRTPESX

SEQ ID NO: 13 - protein, 10 aa, Artificial sequence
  motif 9
  VARIANT (1)..(1): Xaa can be Val or Leu
  VARIANT (4)..(4): Xaa can be Lys or Glu
  VARIANT (6)..(6): Xaa can be Ser, Arg, Ala or Val
  VARIANT (7)..(7): Xaa can be Meet, Val, Ala, Gln or Arg
  VARIANT (8)..(8): Xaa can be Asp or Glu
  VARIANT (9)..(9): Xaa can Asp, Glu or Leu
  VARIANT (10)..(10): Xaa can be Ala, Gly or Asp
XPKXEXXXXX

SEQ ID NO: 14 - protein, 10 aa, Artificial sequence
  motif 10
  VARIANT (2)..(2): Xaa can be Leu or Tyr
  VARIANT (5)..(5): Xaa can be Leu or Ile
  VARIANT (7)..(7): Xaa can be Gly or Ser
  VARIANT (8)..(8): Xaa can be Leu, Met or Pro
  VARIANT (9)..(9): Xaa can be Cys or Tyr
  VARIANT (10)..(10): Xaa can be Ser or Asn
SXDDXQXXXX

SEQ ID NO: 15 - protein, 14 aa, Artificial sequence
  Motif 11
  VARIANT (3)..(3): Xaa can be Met, Val or Ile
  VARIANT (5)..(5): Xaa can be Arg or Lys
  VARIANT (6)..(6): Xaa can be Leu, Ile or Ala
  VARIANT (8)..(8): Xaa can be Thr, Ala or Ser
  VARIANT (9)..(9): Xaa can be Asp or Glu
  VARIANT (12)..(12): Xaa can be Cys or Gly
DSXPXXHXXSSXSE

SEQ ID NO: 16 - DNA, 20 bp, Artificial sequence
  forward primer (OsNAC1)
atggggatggggatgaggag

SEQ ID NO: 17 - DNA, 20 bp, Artificial sequence
  reverse primer (OsNAC1)
tcagaacgggaccatgccca

SEQ ID NO: 18 - DNA, 20 bp, Artificial sequence
  forward primer (OsNAC5)
atggagtgcggtggtgcgct

SEQ ID NO: 19 - DNA, 20 bp, Artificial sequence
  reverse primer (OsNAC5)
ttagaacggcttctgcaggt

SEQ ID NO: 20 - DNA, 2194 bp, Oryza sativa
aatccgaaaagtttctgcaccgttttcaccccctaactaacaatatagggaacgtgtgctaaatataaaatgagaccttatatatgtagcgctgataactagaactatgcaagaaaaactcatccacctactttagtggcaatcgggctaaataaaaaagagtcgctacactagtttcgttttccttagtaattaagtgggaaaatgaaatcattattgcttagaatatacgttcacatctctgtcatgaagttaaattattcgaggtagccataattgtcatcaaactcttcttgaataaaaaaatctttctagctgaactcaatgggtaaagagagagattttttttaaaaaaatagaatgaagatattctgaacgtattggcaaagatttaaacatataattatataattttatagtttgtgcattcgtcatatcgcacatcattaaggacatgtcttactccatcccaatttttatttagtaattaaagacaattgacttatttttattatttatcttttttcgattagatgcaaggtacttacgcacacactttgtgctcatgtgcatgtgtgagtgcacctcctcaatacacgttcaactagcaacacatctctaatatcactcgcctatttaatacatttaggtagcaatatctgaattcaagcactccaccatcaccagaccacttttaataatatctaaaatacaaaaaataattttacagaatagcatgaaaagtatgaaacgaactatttaggtttttcacatacaaaaaaaaaaagaattttgctcgtgcgcgagcgccaatctcccatattgggcacacaggcaacaacagagtggctgcccacagaacaacccacaaaaaacgatgatctaacggaggacagcaagtccgcaacaaccttttaacagcaggctttgcggccaggagagaggaggagaggcaaagaaaaccaagcatcctccttctcccatctataaattcctccccccttttcccctctctatataggaggcatccaagccaagaagagggagagcaccaaggacacgcgactagcagaagccgagcgaccgccttctcgatccatatcttccggtcgagttcttggtcgatctcttccctcctccacctcctcctcacagggtatgtgcctcccttcggttgttcttggatttattgttctaggttgtgtagtacgggcgttgatgttaggaaaggggatctgtatctgtgatgattcctgttcttggatttgggatagaggggttcttgatgttgcatgttatcggttcggtttgattagtagtatggttttcaatcgtctggagagctctatggaaatgaaatggtttagggatcggaatcttgcgattttgtgagtaccttttgtttgaggtaaaatcagagcaccggtgattttgcttggtgtaataaagtacggttgtttggtcctcgattctggtagtgatgcttctcgatttgacgaagctatcctttgtttattccctattgaacaaaaataatccaactttgaagacggtcccgttgatgagattgaatgattgattcttaagcctgtccaaaatttcgcagctggcttgtttagatacagtagtccccatcacgaaattcatggaaacagttataatcctcaggaacaggggattccctgttcttccgatttgctttagtcccagaattttttttcccaaatatcttaaaaagtcactttctggttcagttcaatgaattgattgctacaaataatgcttttatagcgttatcctagctgtagttcagttaataggtaatacccctatagtttagtcaggagaagaacttatccgatttctgatctccatttttaattatatgaaatgaactgtagcataagcagtattcatttggattattttttttattagctctcaccccttcattattctgagctgaaagtctggcatgaactgtcctcaattttgttttcaaattcacatcgattatctatgcattatcctcttgtatctacctgtagaagtttctttttggttattccttgactgcttgattacagaaagaaatttatgaagctgtaatcgggatagttatactgcttgttcttatgattcatttcctttgtgcagttcttggtgtagcttgccactttcaccagcaaagttc

SEQ ID NO: 21 - DNA, 1264 bp, Oryza sativa
tcgacgctactcaagtggtgggaggccaccgcatgttccaacgaagcgccaaagaaagccttgcagactctaatgctattagtcgcctaggatatttggaatgaaaggaaccgcagagtttttcagcaccaagagcttccggtggctagtctgatagccaaaattaaggaggatgccaaaacatgggtcttggcgggcgcgaaacaccttgataggtggcttaccttttaacatgttcgggccaaaggccttgagacggtaaagttttctatttgcgcttgcgcatgtacaattttattcctctattcaatgaaattggtggctcactggttcattaaaaaaaaaagaatctagcctgttcgggaagaagaggattttgttcgtgagagagagagagagagagagagagagagagagagagaaggaggaggaggattttcaggcttcgcattgcccaacctctgcttctgttggcccaagaagaatcccaggcgcccatgggctggcagtttaccacggacctacctagcctaccttagctatctaagcgggccgacctagtagccacgtgcctagtgtagattaaagttgccgggccagcaggaagccacgctgcaatggcatcttcccctgtccttcgcgtacgtgaaaacaaacccaggtaagcttagaatcttcttgcccgttggactgggacacccaccaatcccaccatgccccgatattcctccggtctcggttcatgtgatgtcctctcttgtgtgatcacggagcaagcattcttaaacggcaaaagaaaatcaccaacttgctcacgcagtcacgctgcaccgcgcgaagcgacgcccgataggccaagatcgcgagataaaataacaaccaatgatcataaggaaacaagcccgcgatgtgtcgtgtgcagcaatcttggtcatttgcgggatcgagtgcttcacagctaaccaaatattcggccgatgatttaacacattatcagcgtagatgtacgtacgatttgttaattaatctacgagccttgctagggcaggtgttctgccagccaatccagatcgccctcgtatgcacgctcacatgatggcagggcagggttcacatgagctctaacggtcgattaattaatcccggggctcgactataaatacctccctaatcccatgatcaaaaccatctcaagcagcctaatcatctccagctgatcaagagctcttaattagctagctagtgattagctgcgcttgtgatc

SEQ ID NO: 22 - DNA, 1146 bp, Phyllostachys edulis
actcgagatcgtcgcagaattcacaagacacagccagagcagaagcggagtaagaagaggtcagtaactttcttgaattcaaggatcaagaagagagatcaagaatggggatggcggtgaggagggagagggacgcggaggcggagctgaacctgccgccggggttccggttccacccgacggacgaggagctcgtggagcactacctctgcaggaaggcggcggggcagcgcttgccggtgcccatcatcgccgaggtcgacctctacaagttcgaaccctgggacctgcccgagcgggcgctgttcgggaccaaggagtggtacttcaccacgcccagggaccgaaagtaccccaacgggtcgcgccccaaccgcgccgccgggaacgggtactggaaggccaccggcgccgacaagcccatcgcgccgcgggggcgcaccttggggatcaagaaggcgctcgtcttctacgccggcaaggccccccgcggggtcaagaccgactggatcatgcacgagtaccgcctcgccgacgagagccgcgccaccacaggtgccaagaagggatccctcaggttggatgattgggtgctgtgccgattgtgcaacaagaagaacaagtgggggaagatgcagctggggaaggagaccaaggaagaggcgtcggacatgatcacctcgcagtcccactcccactcgtggggcgagacgcgcacgccggagtcggagatcgtggacaacgacccgttcccggcgttccaggacccggcggcgcagatgacgatgatggtgcccaagaaggagcaggaggtggacgggggcgcgcggaacgccaggaacgacctgttcgtggacctcagctacgacgacatccagagcatgtacagcggcctcgacatgctaccgcccggggacgacttctactcgtcgctcttcgcgtcgccgcgggtcaaggcgaatcagcccggcgccggcggcatggcccccttctgaagaagacggcgtggggagaagacgtttccaagtcgcaacctctgttaatatagaataggaatgggacattcttccgttttttacttttactcggacggtagatacacgcagctctgccttctctttaatagaaccgaccaaattttgttgt

SEQ ID NO: 23 - protein, 296 aa, Phyllostachys edulis
MGMAVRRERDAEAELNLPPGFRFHPTDEELVEHYLCRKAAGQRLPVPIIAEVDLYKFEPWDLPERALFGTKEWYFTTPRDRKYPNGSRPNRAAGNGYWKATGADKPIAPRGRTLGIKKALVFYAGKAPRGVKTDWIMHEYRLADESRATTGAKKGSLRLDDWVLCRLCNKKNKWGKMQLGKETKEEASDMITSQSHSHSWGETRTPESEIVDNDPFPAFQDPAAQMTMMVPKKEQEVDGGARNARNDLFVDLSYDDIQSMYSGLDMLPPGDDFYSSLFASPRVKANQPGAGGMAPF

SEQ ID NO: 24 - DNA, 1472 bp, Sorghum bicolor
acaccgcggaaaccatccacaggacacacagagccgagccacccaccatcgacagcacccagccgccggagcgcgagcttctttacacagcaggccggagaaacacaggcagccaaagccgccaccgcttttaccgaccgaccgatcggtgttgccgccgcctgtcgggtttaagcaaccaaccagaccaagccatgggattgccggtgatgaggagggagagggacgcggaggcggagctgaacctgccgccggggttccggttccaccccacagacgacgagctggtggagcactacctgtgccggaaagcggcggggcagcgcctcccggtgcccatcatcgcggaggtggacctatacaagttcgacccctgggacctgccggagcgcgcgctgttcggggtcagggagtggtacttcttcacgcccagggaccgcaagtacccaaacgggtcccgccccaaccgcgccgccggcaacgggtactggaaggccaccggcgccgacaagcccgtcgcgccgcggggccgcacgctcgggatcaagaaggcgctcgtcttctacgccgggaaggcgccgcgtggggtcaagacggactggatcatgcacgagtacaggctcgcggacgccggccgcgcagccgcctccaagaagggatcgctcaggctggatgactgggtgctgtgccgcctgtacaataagaagaacgagtgggagaagatgcagctggggaaggagtccgccgccggcgtcggcaccgccaaggaggaggcgatggacatgaccacctcgcactcgcactcccactcgcagtcgcactcgcactcgtggggcgagacgcgcacgccggagtcggagatcgtggacaacgacccgttcccggagctggactcgttcccggcgttccaggacccggcggcggcgatgatgatggtgcccaagaaggagcaggtggacgacggcagcgccgccgccaacgccgccaagagcagcgacctgttcgtggaccttagctacgacgacatccagggcatgtacagcggcctcgacatgctgcccccgccaggggaggacttcttctcctcgctcttcgcgtcgcccagggtcaaggggaaccagcccgccggagccgccgggttggggccattctgaggctgaggcgagcgaggatggagccatggatcaggagaagacagcgttgcaaggttgcgaactctgtaaatacagcataggagtcgaacctgaacccgactctgaacctggtcggggttacagggttatgggtgtcggtgttagcgtacatggagccggccggcccagtgttggcgaggctcattctttagtttcactttcaacgcagaagacggtagatatatgtgtagctgttcactttcatcacttcctcttcaacagaaccgacgaaattttgctgctcttgttaacaacttacgagtactaccgtgtgtccgt

SEQ ID NO: 25 - protein, 319 aa, Sorghum bicolor
MGLPVMRRERDAEAELNLPPGFRFHPTDDELVEHYLCRKAAGQRLPVPIIAEVDLYKFDPWDLPERALFGVREWYFFTPRDRKYPNGSRPNRAAGNGYWKATGADKPVAPRGRTLGIKKALVFYAGKAPRGVKTDWIMHEYRLADAGRAAASKKGSLRLDDWVLCRLYNKKNEWEKMQLGKESAAGVGTAKEEAMDMTTSHSHSHSQSHSHSWGETRTPESEIVDNDPFPELDSFPAFQDPAAAMMMVPKKEQVDDGSAAANAAKSSDLFVDLSYDDIQGMYSGLDMLPPPGEDFFSSLFASPRVKGNQPAGAAGLGPF

SEQ ID NO: 26 - DNA, 994 bp, Zea mays
ctccagctccatccaaatccaccgccagcaagcaagccggcgccatgggtctgccgatgaggagggagagggacgcggaggcggagctgaacctgccgccggggttccggttccaccccacggacgacgagctggtggagcactacctgtgccgcaaggcggcggggcagcgcctccccgtgcccatcatcgccgaggtggacctgtacaggttcgacccctgggacctgccggagcgcgcgctcttcggggcccgcgagtggtacttcttcacgcccagggaccgcaagtaccccaacggctcccgccccaaccgcgccgccggcaacgggtactggaaggccaccggcgccgacaagcccgtcgcgccgcgcggccgcacgctcgggatcaagaaggctcttgtcttctacgccggtaaggcgccgcgcggggtcaagacggactggatcatgcacgagtacaggctcgccgacgccggccgcgccgccgccgccaagaaggggtcgcttaggttggatgactgggtgctgtgccggctgtacaacaagaagaacgagtgggagaagatgcagctggggaagaccgccgtcgccggcgtcggcgccaccaaggaggaggcgatggacatggccacctcgcacacgcactcccactcccaatcacactcgcactcgtggggcgagacgcgcacgccagagtcggagatcgtggacaacgacccgttcccggagctggactcgttcccggcgttccaggacccggcgatgatgatgacggtgcccaaggaggagcaggtggacggctgcagcgccaagagcggcaacctgttcgtggacctcagctacgacgacatccagggcatgtacagcggcctcgacatgctgccgccgcccggggaggacttctactcctcgctcttcgcgtctcccagggtcaaggggaaccagcccgccggagccgccgggttgggacagttctgagctgagtcgag

SEQ ID NO: 27 - protein, 312 aa, Zea mays
MGLPMRRERDAEAELNLPPGFRFHPTDDELVEHYLCRKAAGQRLPVPIIAEVDLYRFDPWDLPERALFGAREWYFFTPRDRKYPNGSRPNRAAGNGYWKATGADKPVAPRGRTLGIKKALVFYAGKAPRGVKTDWIMHEYRLADAGRAAAAKKGSLRLDDWVLCRLYNKKNEWEKMQLGKTAVAGVGATKEEAMDMATSHTHSHSQSHSHSWGETRTPESEIVDNDPFPELDSFPAFQDPAMMMTVPKEEQVDGCSAKSGNLFVDLSYDDIQGMYSGLDMLPPPGEDFYSSLFASPRVKGNQPAGAAGLGQF

SEQ ID NO: 28 - DNA, 1075 bp, Triticum aestivum
tcatcgaccaactctcttccaagtttcgattcaacggacatggggatgccggcggtgaggaggagggagagggacgcggaggcggagctcaacctgccgccgggcttccgcttccaccccaccgacgacgagctcgtggagcactacctgtgccgcaaggcggccggccagcgcctgcccgtgcccatcatcgccgaggtcgacctctaccgcttcgacccgtgggcgctccccgaccgcgccctcttcggcacccgcgagtggtacttcttcaccccgcgcgaccgcaagtaccccaacggctcccgccccaaccgcgccgccggcaacggatactggaaggccaccggcgccgacaagcccgtcgcgccccgcggtgggaggaccatggggatcaagaaggccctggtgttttacgccggcaaggcgcccaagggggttaagaccgactggatcatgcatgagtaccgcctcgccgacgccggccgcgccgccgccagcaagaagggctcgctcaggctggacgactgggtgctctgccggctctacaacaagaagaacgagtgggagaagatgcagctccagcagcaggggggagaggagatgatggtggagcccaaggaggagcacgccgcgtcggacatggtggtcacctcgcactcccactcgcagtcccagtcgcactcgcactcctggggcgaggcgcgcacgcccgagtcggagatcgtcgacaacgacccgtcgctgttccagcaggcggcggcgttccaggcccagagccccgccgccgcggcggcgcaccaggagatgatggccacgctgatggtgcccaagaaggaggcggcggacgaggccggcaggaacgacctgttcgtggacctcagctacgacgacatccagagcatgtacaacggcctcgacatgatgccgccaggggacgatctgctctactcgtccctcttcgcctccccaagggtccgggggagccagcccggcgccggcggcatgccggccccgttctaagcagagccaagacacagaccgtcagataccgagatcgacagaagtggaacgg

SEQ ID NO: 29 - protein, 327 aa, Triticum aestivum
MGMPAVRRRERDAEAELNLPPGFRFHPTDDELVEHYLCRKAAGQRLPVPIIAEVDLYRFDPWALPDRALFGTREWYFFTPRDRKYPNGSRPNRAAGNGYWKATGADKPVAPRGGRTMGIKKALVFYAGKAPKGVKTDWIMHEYRLADAGRAAASKKGSLRLDDWVLCRLYNKKNEWEKMQLQQQGGEEMMVEPKEEHAASDMVVTSHSHSQSQSHSHSWGEARTPESEIVDNDPSLFQQAAAFQAQSPAAAAAHQEMMATLMVPKKEAADEAGRNDLFVDLSYDDIQSMYNGLDMMPPGDDLLYSSLFASPRVRGSQPGAGGMPAPF

SEQ ID NO: 30 - DNA, 1516 bp, Hordeum vulgare
gaccatcaccacacaacccaactcctctcactccccaacaatctcaaacaacagctcgaggaatcaacagcagcgactactctgttcgttgaaccaacaatcaacagacggacatggggatgccggcggcgaggaggagggagagggacgcggaggcggagctgaacctgcccccgggattccgcttccaccccaccgacgacgagctggtggagcactacctgtgccgcaaggcggcggggcagcgcctgcccgtgcccatcatcgccgaggtcgacctctaccgcttcgacccgtgggcgctccccgaccgcgccctcttcggcacccgcgagtggtacttcttcacgccccgcgaccgcaagtaccccaacggatcccgccccaaccgcgccgccggcaacggctactggaaggccaccggcgccgacaagcccgtcgcgccccgcgggggtcgcaccatggggatcaagaaggccctcgtgttctacgccggcaaggcgcccaagggggtcaagacggactggatcatgcatgagtaccgcctcgccgacgccggacgcgccgccgccagcaagaagggctccctcaggctggacgactgggtgctctgccggctgtacaacaagaagaacgagtgggagaagatgcagctgcagcagcagcagggggaaggggagaccatgatggagcccaaggcggaggagaacacggcgtccgacatggtcgtcacctcgcactcccactcccagtcccagtcgcactcgcactcgtggggcgaggcgcgcacgcccgagtcggagatcgtcgacaacgacccgtcgctgttccaccaggcgcaggcgacggcgttccagacgcagagccccgcggccgccgcggcgcaccaggagatgatggccacgctgatggtgcccaagaaggaggcggccgatgagggcaggaacgacctgttcgtggacctcagctacgacgacatccagagcatgtacaacggcctcgacatgatgccgcccggggacgacctgctctactcctccttcttcgcctcccccagggtccggggcagccagcccggctccggcggcatgccagccccgttctaagcacacagcaaagacagaccatcagaccgtcagactccgatcgacagaagcggaatggatgacttcttcgccgcgggcgagcgagcgagatcgcggtgcagtgtaaatacagcataggaaacgggagggaggtggccgtcctgtctgagagaagccggcgtggtgagggcggcggcgccggggcgtgttgctgtacatggagagcccggcgccggggcctggccggctgggttgattctttcgttcttactttgtactctcaatgcggatgtagctctcttctcttctcactcctcagtagtagaatgagaatcgaccgaccaaatacatatgtagctctgtttcttccttctcttcagtagaaatcaaccaaattttgctgtttatgctgctcaaaaaaaaaaaaaaaa

SEQ ID NO: 31 - protein, 328 aa, Hordeum vulgare
MPAARRRERDAEAELNLPPGFRFHPTDDELVEHYLCRKAAGQRLPVPIIAEVDLYRFDPWALPDRALFGTREWYFFTPRDRKYPNGSRPNRAAGNGYWKATGADKPVAPRGGRTMGIKKALVFYAGKAPKGVKTDWIMHEYRLADAGRAAASKKGSLRLDDWVLCRLYNKKNEWEKMQLQQQQGEGETMMEPKAEENTASDMVVTSHSHSQSQSHSHSWGEARTPESEIVDNDPSLFHQAQATAFQTQSPAAAAAHQEMMATLMVPKKEAADEGRNDLFVDLSYDDIQSMYNGLDMMPPGDDLLYSSFFASPRVRGSQPGSGGMPAPF

SEQ ID NO: 32 - DNA, 1532 bp, Eleusine coracana
aataaccttcaagaacatcgcggaatacactactccacagggggaggagcccggaagcactactaatcattcacaaagcagcagcaggcagctttagcagtcgaggggagcgagcggatcgagtgatcagattcttcaatttcgtcaaaacaggagggagagaggaaagaggataaatcatcgaccatgaccatgggaggagggatgatgtccgtgccggtgcggcgggagcgcgacgcggaggcggagctgaacctgccgccagggttccggttccacccgacggacgacgagctggtggagcactacctgtgccggaaggcggcggggcagcgtctccccgtgcccatcatcgccgaggtggacctctacaagttcgacccgtgggacctccccgaccgcgcgctcttcggcaccggggagtggtacttcttcaccccgcgggaccgcaagtaccccaacgggtcgcgacccaaccgcgccgccggcaacgggtactggaaggccaccggcgccgacaagcccgtcgcgcccaaggggcgcacgctcgggatcaagaaggcgctcgtgttctatgcgggcaaggcgccgcgcggggtcaagacggactggatcatgcacgagtaccgtcttgctgatgccggccgcgccgccgctgccaaaaagggatcgctaaggttggatgactgggtgctgtgccgcctgtacaacaagaagaacgagtgggagaagatgcagatgaagaagggctaccggcgccgccactgccactgcaaaggaggaggaagccggcggagacatgaccacctcctggaactcgcactcgcactcgtggggcgagacccgcacgccggagtcggagatcgtggacaacgacccgttcccggagctcgactcgttcccggcgttccaggacccggcaccgcagcagcatcagcagcagatgatggtgcccaagaaaggagagggtggacgacgccgccgccgccggcaagacacccctctcttcatcgacctccagctatgacgacatccagagcatgtaccagcggcctcgacatgctgccgccccccgggggaggacttctactcctcgctcttcgcgtcgcccagggtcaaggggaaccagaccgcccggcgtcggtggcttggcccccttctgaagtgatgctgagcggcgcgcgttggtgttgctggaaccatcatcatcagtcgtctcgtcgggataggccgtccgacgaacgccaagacggcggcggcggcgactttgcaggactgcagctgcgacctctgtaaatacagcagcgtaggagtcgaagaacctgaacctgatccgggttacggggtggttaaaactctaaaagtgtcggcgtagcgtacatggagtcgacggcccggcgttggcgccgggtcattcttttgtttcaacttttactctgctcggaccatagatatacagcatgtagctcttctcactcgacaaaatcgaccaaattttgcgtttcttgtctaaaaaaaaaaaaaaaaaaaaa

SEQ ID NO: 33 - protein, 369 aa, Eleusine coracana
MTMGGGMMSVPVRRERDAEAELNLPPGFRFHPTDDELVEHYLCRKAAGQRLPVPIIAEVDLYKFDPWDLPDRALFGTGEWYFFTPRDRKYPNGSRPNRAAGNGYWKATGADKPVAPKGRTLGIKKALVFYAGKAPRGVKTDWIMHEYRLADAGRAAAAKKGSLRLDDWVLCRLYNKKNEWEKMQMKKGYRRRHCHCKGGGSRRRHDHLLELALALVGRDPHAGVGDRGQRPVPGARLVPGVPGPGTAAASAADDGAQERRGWTTPPPPARHPSLHRPPAMTTSRACTSGLDMLPPPGGGLLLLALRVAQGQGEPDRPASVAWPPSEVMLSGARWCCWNHHHQSSRRDRPSDERQDGGGGDFAGLQLRPL

SEQ ID NO: 34 - DNA, 894 bp, Vitis vinifera
atgaagagggagagagatgcagaggcggagttgaatcttccccccggattccggttccatcccacagatgaagagcttgttgttcattacctttgccgcaaggccagctaccagactctaccggttccaattattgttgagattgacctttataaatatgatccttggcagcttcctgagaaggcgctgttcggaatcaaggaatggtacttctttacacctcgggacaggaagtacccgaatgggtcgagacctaacagagccgcaggcaatggatactggaaagcaactggcgctgataaacccgttagaccaacgggaagcacaaaagctgttggaataaagaaagcgctggttttctactctggaaaagctcctaaaggaaccaagactgattggattatgcatgagtacaggcttgcccaaccaaatcgttcatctgataaaaagagcagtttaaggttggacgactgggttctttgccggatctacaacaaaaagaacaattggagggagaagatgcaacaccaaatgaaccaactattacctcatgaacctattgatccctttgaggtggctgaagacgatgggtcagacagtctgaggacccctgaatcagatattgacattgagactctttcttacaatcacgatctacatggtgcccaggggcagggctattcatatcaagtgctacatgataacaatttgcaaattactgatactgacagcggtttccccgcacgagaatgcttcaaagaagaagatgactactggttaacaaacttgaatctggaagatctgcagaattcccttacaacctttggaacaatgcccttaccagatttcagttatcaggattctttttcaatgatccatggtttaccatactaa

SEQ ID NO: 35 - protein, 297 aa, Vitis vinifera
MKRERDAEAELNLPPGFRFHPTDEELVVHYLCRKASYQTLPVPIIVEIDLYKYDPWQLPEKALFGIKEWYFFTPRDRKYPNGSRPNRAAGNGYWKATGADKPVRPTGSTKAVGIKKALVFYSGKAPKGTKTDWIMHEYRLAQPNRSSDKKSSLRLDDWVLCRIYNKKNNWREKMQHQMNQLLPHEPIDPFEVAEDDGSDSLRTPESDIDIETLSYNHDLHGAQGQGYSYQVLHDNNLQITDTDSGFPARECFKEEDDYWLTNLNLEDLQNSLTTFGTMPLPDFSYQDSFSMIHGLPY

SEQ ID NO: 36 - DNA, 1329 bp, Phyllostachys edulis
agtccaaactttccagagatcctgattagcagctaaccagcctccctgatcccctaatccaccattaataagcaaccttttgctgtgatctggtgcttgcaatggactgcggtggtgcgctgcagctgccgccggggttccggttccacccgaccgacgacgagctggtgatgtgctacctctgccgcaagtgcggcggcctgcccctcgccgcgcccgtcatcgccgagatcgacctctacaagttcaacccatgggagctcccagagaaggcgatgggaggggagaaggagtggtacttcttctcgccgagggacaggaagtacccgaacgggtcgcggccgaaccgggcggcggggacggggtactggaaggcgacgggggccgacaagccggtggggttgccgcggccggtggccatcaagaaggcgctcgtcttctacgccggcaagccacccaagggcgtcaagaccaactggatcatgcacgagtaccgcctcgccgacgtcgaccgctccgccgccgcgcgcaagaagtccaacaacgcgctcaggttggatgactgggtgctgtgccgaatctacaacaagaagggcgtcatcgagcggtacgacacggtgcccgccggcgacgtcaagcaggccgcggcggccaagaagccgcggccggggcatcacgccggtggggcggcggggacggcgatgaagctcgagctgtccgactacggctactacccgccgtcgccgccgccgacgtcggcgacggagatgctgtgcttcgaccggtcggggtcggcggaccgggagtcgatgccgcggctgcacacggactccagcagctccgatcacgtgctgtcgccgtctccggacttcccgagcgacggcgatcgcgacctggattacgccgagagccagcccaccggcggcggatggccgggcgacgactggggcgtcgacgacgggttcgtcatcgacagctcgctcttcgaggcgccgtcgccgggcgtcttcgcccgggacggcgccttgttcggggacatgttcacgtacctgcagaagccgttctgaaagaacgcagcatcgatctgcacgtactacgtactctagcacactaacatgttcaggtcgtgtaatccggttcaggaaaatttaattaccagtctaggtacatcaaaaccaaatcaaccgtgcacacttcctcccgcggcagatcaatggaaagaagagagagttaatagtgcaccaatacctaattgcgaattcgcgattggatgcagagttttccgcaccatatatataagaggttcactatgtcatattgacatgacat

SEQ ID NO: 37 - protein, 321 aa, Phyllostachys edulis
MDCGGALQLPPGFRFHPTDDELVMCYLCRKCGGLPLAAPVIAEIDLYKFNPWELPEKAMGGEKEWYFFSPRDRKYPNGSRPNRAAGTGYWKATGADKPVGLPRPVAIKKALVFYAGKPPKGVKTNWIMHEYRLADVDRSAAARKKSNNALRLDDWVLCRIYNKKGVIERYDTVPAGDVKQAAAAKKPRPGHHAGGAAGTAMKLELSDYGYYPPSPPPTSATEMLCFDRSGSADRESMPRLHTDSSSSDHVLSPSPDFPSDGDRDLDYAESQPTGGGWPGDDWGVDDGFVIDSSLFEAPSPGVFARDGALFGDMFTYLQKPF

SEQ ID NO: 38 - DNA, 1230 bp, Hordeum vulgare
gaaaatcttccccaagagccgccgccgatagtcgagacagccgcctcgcctccactacaaccgatcgcgcgagcgcccgccgcccgttcctccgagctcgctcaagccaagcccccgttcgtgaatggaccacggcttcgacggcgccctccagctgcccccggggttcaggttccaccccacggacgaggagctggtgatgtactacctctgccgcaagtgcggcggcctgcccatcgccgcgccggtgatcgccgaggtcgacctgtacaagctggagccgtggaggctgccggagaaggcggcggggggaggccaggactccaaggagtggtacttcttctcgccgcgggaccgcaagtaccccaacgggtcgcgcccgaaccgcgccgccgggacgggctactggaaggccacgggcgccgataagcccgtcggctcgccccgccccgtcgccatcaagaaggccctcgtcttctacgccggcaagccacccaagggcgtcaagaccaactggatcatgcacgagtaccgcctcgccgacgtcgaccgctccgccgccgcccgcaagaagtccaacaacgcgctcaggctggatgactgggtgctgtgccgaatctacaacaagaagggcgtcatcgagcggtacgacacggtggagtccgacgtcgccgatgtcaagccggcgccggcgccggctgccaagaacccgcggcagggacactacgctcctgggccggcaatgaaggtcgagctctctgactacgggttctaccagcagccgtcgccgccggcgacggagatgctctgcttcgaccggtccgggtcggcagacagggactcgaaccactccatgccgcgcctgcacacggactccagctcctcggagcgcgcgctgtcctcgccctcgcccgacttccctagcgacatggactacgcggagagccagcacgcggccggcctcgccggaggctggccaggcgacgactggggcggcgtcatcgacgacgacgggttcgtcatcgacggctcgctgatcttcgacccgccgtcgccgggcgccttcgcccgcgacgccgccgcgttcggggacatgctcacgtacctgcagaaaccgttctgaatgagcgcagcgcagcatccgtcagactcctccttaacagcccccactaacatgtccatcaggtctcgtgtaatacagttcaggaaaactgatcacatgtctaggtg

SEQ ID NO: 39 - protein, 332 aa, Hordeum vulgare
MDHGFDGALQLPPGFRFHPTDEELVMYYLCRKCGGLPIAAPVIAEVDLYKLEPWRLPEKAAGGGQDSKEWYFFSPRDRKYPNGSRPNRAAGTGYWKATGADKPVGSPRPVAIKKALVFYAGKPPKGVKTNWIMHEYRLADVDRSAAARKKSNNALRLDDWVLCRIYNKKGVIERYDTVESDVADVKPAPAPAAKNPRQGHYAPGPAMKVELSDYGFYQQPSPPATEMLCFDRSGSADRDSNHSMPRLHTDSSSSERALSSPSPDFPSDMDYAESQHAAGLAGGWPGDDWGGVIDDDGFVIDGSLIFDPPSPGAFARDAAAFGDMLTYLQKPF

SEQ ID NO: 40 - DNA, 1367 bp, Sorghum bicolor
attccaaaagctctccagctagtcgtctcctccaaccagcagagaggccgcgcgcgaacgaagcgaaggccccagcacagcaatcagctgagctctcctcgtcctcgccctgctcgtctcgaacctcgaagctctccaatccgccggtcgatcgccggaggttgctaaggtcgtgccggatcgatcgatcgacgacgaccgagatcgatcgaatggactgcggtggcgcgctgcagctcccgcccgggttccggttccaccccaccgacgacgagctggtgatgtactacctcctccgcaagtgcggcggcctgcccctcgccgcgccggtcatcgccgaggtcgacctctacaagttcgatccatggcagctcccagagaaggcgtatggtggggagaaggagtggtacttcttctcgccgagggaccgcaagtacccgaacgggtcgaggccgaacagggcggccgggacggggtactggaaggccaccggcgccgacaagcccgtcgggtcgccgcgccccgtcgccatcaagaaggccctcgtcttctacgccggcaagccgcccaagggcgtcaagaccaactggatcatgcacgagtaccgcctcgccgacgtcgaccgttccgccgccgcacgcaagaagaccaacaacgccctcaggctggatgactgggtgctgtgccggatctacaacaagaagggcgtgatcgagcggtacgacacggtggacgacgacgccgacgacgccgtggcagaggacgtcaagcctgcgccggcgtccaggaataacccgcgcgggaccgccagtggccgcggcggggcagcagcagcagcggcgccgatgaaggtggagttcccggagtacggtgggtactacgactacgaagacctcgaggcgacgccgtcggcggggatgctgtgcttcgatcgcccgtcggccgcggtcccgacggccccagcctctgcgcccgcgcccgcgcccgggccggcgctgtcgtcgccgccgccggcggcggactcggacccagagcgcgacgacgactcgaacaactccgtggcgtggacgatgcaccacacgcacgcgcacacggacaactactccagctgcggctccgagcacgtgctgtcgccgtcgccggacctccccgaccgcgaccacgccgagagccagtccgccgggttatggtggcccgtcggcgtcggcggcgactgggccgccgccgaggacgggttcatggtcgacgtcgacgtcgacgacgggagctcgctgttcgggccgccgtccccggggctgccgttcgctcgcgtcgacgccgccgcgttcggcgacatgctcgcgtcgtacctccacaagccgttctga

SEQ ID NO: 41 - protein, 384 aa, Sorghum bicolor
MDCGGALQLPPGFRFHPTDDELVMYYLLRKCGGLPLAAPVIAEVDLYKFDPWQLPEKAYGGEKEWYFFSPRDRKYPNGSRPNRAAGTGYWKATGADKPVGSPRPVAIKKALVFYAGKPPKGVKTNWIMHEYRLADVDRSAAARKKTNNALRLDDWVLCRIYNKKGVIERYDTVDDDADDAVAEDVKPAPASRNNPRGTASGRGGAAAAAAPMKVEFPEYGGYYDYEDLEATPSAGMLCFDRPSAAVPTAPASAPAPAPGPALSSPPPAADSDPERDDDSNNSVAWTMHHTHAHTDNYSSCGSEHVLSPSPDLPDRDHAESQSAGLWWPVGVGGDWAAAEDGFMVDVDVDDGSSLFGPPSPGLPFARVDAAAFGDMLASYLHKPF

SEQ ID NO: 42 - DNA, 1347 bp, Zea mays
cagctttccagcgatcggcagctcctcgatcgtttcgaagctccaatccgcccggccgcctccgcctgttgccactagctaggtgatcgatcgaatggactgcggtggcgcgctgcagctcccgcctgggttccgcttccaccccaccgatgacgagctggtgatgtactatctcctccgcaagtgcggcggcctgccgctcgccgcgccggtcatcgccgaggtggatctctacaagttcgacccatggcagctcccagagaaggcgttcggtggggagaaggagtggtacttcttctcgccgcgcgaccgcaagtacccgaatggctccaggcctaaccgggcggccgggacagggtactggaaggccaccggcgccgacaagccggtagggtcgccgcgccccgtggccatcaagaaggcgctcgtcttctacgccgggaagccgcccaagggcgtcaagaccaactggatcatgcacgagtaccgcctcgcggacgtcgaccgctcggccgccgcacgcaagaagaccaacaacgcgctcaggctggatgactgggtgctgtgccggatctacaacaagaagggtgttatcgagcggtacgacacagtggacgacgacgacggcgacggcgccgtggccgaagacgtcaagccggtgccggcgccggcggcgtcgaagaacccgcgttcggcttcggcgacatgctcgcgtcgtacctgcacaaaccgttctgatgcaacgcgacgcgacgcgagcgcggccaccccgcgcctgcgtgctcctctaggccactgaccactgacatggacattctggtcgtcgtgtagctcggttcaggacgaatcgagagccggccggtctaggtgtagtgctgcgaaaccaacaccaccgtgcaggcacactctccgcgggcggcagatcgacggacaatcctgcgcccgtaggtatataccggtcgtcgatcaggtgttcatcagttcttcattcattcaggtcgacgtgcaactggtaattgtacaagatcttgggcagctgccgtatggagatcgatgagtgccgagttagcatggaggacgactggtggtcatggttggtacagagctagctagccgtccgatcgggtatcggattaatctgattgccagttttgtttttttttggtcgcgtcaagtagctgacatcttaagaatgaagcctactggattcagaggcctgttgatggtaatggtatggtgtatgtatatcgtctagtttagtctagcctagctgtacttagaattggttcaggttggtggcaagcagagcgctgtaatttttgttgagtgtttatgcactataattgc

SEQ ID NO: 43 - protein, 234 aa, Sorghum bicolor
MDCGGALQLPPGFRFHPTDDELVMYYLLRKCGGLPLAAPVIAEVDLYKFDPWQLPEKAFGGEKEWYFFSPRDRKYPNGSRPNRAAGTGYWKATGADKPVGSPRPVAIKKALVFYAGKPPKGVKTNWIMHEYRLADVDRSAAARKKTNNALRLDDWVLCRIYNKKGVIERYDTVDDDDGDGAVAEDVKPVPAPAASKNPRSASATCSRRTCTNRSDATRRDASAATPRLRAPLGH

SEQ ID NO: 44 - DNA, 1019 bp, Vitis vinifera
gtttcaagcgccgtcttggctcagagcaaagccgtgagagaagagaaaaaaaaggtcagggagaaacattcattcaagagaggaaggagagagaagctaatatgacagcggagttgcagttacctccaggcttcaggttccatccgacggatgaggagcttgtgatgcactatctgtgccgtaaatgtgcatcgcaatcgatcgccgtgccgatcattgccgaaattgatctctacaaattcgatccctggcagcttcctgagatggccttgtacggagagaaagagtggtacttcttttcgccgagagatcggaaatatccgaacggttcaaggccgaaccgggcagcgggaacagggtactggaaggccaccggagcggataagcctattgggcatccgaagccggttgggattaagaaggctttggttttttatgccggaaaagcccccaggggagagaagacaaattggattatgcatgaataccggctggcagacgtggaccggtcggctcgcaagaagaataatagcttaaggttggacgattgggttctgtgccgcatatacaacaagaagggcattgtcgagaaacaacacaccgctgcccggaaatcagattgctccgatgttgaggatcaaaagcctggacctcttgctctaagcaggaaggtaggtgcgatgcctccacctccgccgccatcgtcctctacggcaccaactgcgacagcggcactggacgatttggtgtacttcgactcatcggattcggtgccgcgcctccacaccgactcgagctgttcggagcacgtggtgtcgccggagttcacgtgcgagagggaggtgcagagcgagcccaagtggaaggagtgggaaaatcccatggacttttcgtacaattacatggatgccacagttgacaacgcatttttgtctcagttcccgaataatcagatgtcgccattgcaggacatgttcatgtacctgcagaagcccttctgatctgtcatcgcatcaaaa

SEQ ID NO: 45 - protein, 299 aa, Vitis vinifera
MTAELQLPPGFRFHPTDEELVMHYLCRKCASQSIAVPIIAEIDLYKFDPWQLPEMALYGEKEWYFFSPRDRKYPNGSRPNRAAGTGYWKATGADKPIGHPKPVGIKKALVFYAGKAPRGEKTNWIMHEYRLADVDRSARKKNNSLRLDDWVLCRIYNKKGIVEKQHTAARKSDCSDVEDQKPGPLALSRKVGAMPPPPPPSSSTAPTATAALDDLVYFDSSDSVPRLHTDSSCSEHVVSPEFTCEREVQSEPKWKEWENPMDFSYNYMDATVDNAFLSQFPNNQMSPLQDMFMYLQKPF

SEQ ID NO: 46 - DNA, 1062 bp, Populus trichocarpa
cctcctcatgtctatctcttggagagtatcataattcagaaagcaagagctaagcagcagcagcagcagcacagcaagaacaagcagctctcttagagagattcaagacaaggaagaaaagcaccaagaacgatttcaaagctgggaatgaaaggaaatagatcagcagatcagttggagttaccagctggatttagatttcatccaacagatgatgagttggtgaatcattacttgcttaagaaatgtggaggccaatcaatttctgctcctattattgctgagattgatctttataagtatgatccttggcagcttccagaaatggcactatatggtgaaaaggaatggtacttcttttctccaagggatagaaaatatccaaacggttcaaggccgaaccgggcggctggaaccgggtattggaaagcaaccggagcagataaacccattggtcggcccaaaccactaggcataaaaaaagctcttgtattttatgctggtaaagctcctaaaggaatcaaaaccaattggatcatgcatgaatatcgccttgctaatgttgacaggactgccggcaagaaaaataacctcaggcttgatgattgggtattatgtagaatatacaacaagaaaggaagcgtagagaagcattttcctgctgaaagaaaatcaatagcaaagtatccagagatggaagagcagaagcccaacatcagtgaaatgtctggctatcataatggaatgtcacaaattgcagcaccgacaatgatgatgagtaatagcaatgacttcttatatatggacacatctgattcaattccaaggttgaatacagactcaagtagttcagagcacgtgctgtcacctgaggtcacatgcgagaaggaggttcagagtcagccaaaatggaatgatcagctagataatgccttcgatttcaacttcaattacattgatgatggcttccaagattacccttttgcttcacaagatcagttccaattggaccagctctcacctttgcaggacatgttcatgtatttacagaagccattttga

SEQ ID NO: 47 - protein, 304 aa, Populus trichocarpa
MKGNRSADQLELPAGFRFHPTDDELVNHYLLKKCGGQSISAPIIAEIDLYKYDPWQLPEMALYGEKEWYFFSPRDRKYPNGSRPNRAAGTGYWKATGADKPIGRPKPLGIKKALVFYAGKAPKGIKTNWIMHEYRLANVDRTAGKKNNLRLDDWVLCRIYNKKGSVEKHFPAERKSIAKYPEMEEQKPNISEMSGYHNGMSQIAAPTMMMSNSNDFLYMDTSDSIPRLNTDSSSSEHVLSPEVTCEKEVQSQPKWNDQLDNAFDFNFNYIDDGFQDYPFASQDQFQLDQLSPLQDMFMYLQKPF

SEQ ID NO: 48 - DNA, 2361 bp, Oryza sativa
gatactactcggcaaggcaaatcctgccagactgggagccatggcgaaatccaatgcatctcgtgcttctgccactcgtagaaagttctacttcttgcagaaatctctgcttgtctcttctttgcttgcggttgttgcagcagatgttgttggagcagggccaaaccagcagtgttttccttcctcctgtggtgatcttggcaacatatcctaccctttccgtcttgcaagcgattcacgcccgtgcgttggtactcttcgcccatggtacaacctctcatgtagcagtggcagggctaccattcagatcaacacacggacgtactatgtcaccagcatcaactatactggtgagatcttctcggttgtggatgccaccttgcaggatgatgatacaaacggcaccagctgccctcttcctcgctctgatcaccttccttacatcgattactggcctccgtatttgggggaaagttcaaccgattcttatggttttgtctatttggccactgcttcagacacttgggcatgctttgtgaattgttcccgagcaagaacagatactatgccctggtacaggccagttacatgtctacttcccaacaattcatttgtttttgtctcgtttgatgactgtgccgttggagagcttcaaccttcctgtcgatatttggccatgattcccgttgacagatggaatctaccggacaactcctcacagctacagaatgcaagttacacagatatcataggattcataaggaaaggatttagtgttcggtttccatatcgtcctgaccagtaccagagtcctcgtatgagcgccagggaatgcctgaaggattcaaacaggtacttcaaggagcgtatatctcatccaagcattctgaatttaacccgtgctattttctggagcgaaacaaactccgaagtagactgcggatatgaagttgccccccaaaaagataggatttttttgggaaccatagtatcggctattgatatcatcaaatttcatttcgttttattcaggttagtgttggggtcactggtggtattcatcttccttgcccacaagtactggaaaacagggatcacgatcgacgcagtagagaagttccttcgaatgcagcagatgattggtccgacgaggtttgcctacacagacattattgcaatcacatcccattttcgagacaagctaggccagggaggctatggctctgtatataaaggtgtactgctcccgggtaatgtccatatcgctgtcaagatgctgactggtagctccagctgcaacggagatgagttcatcagtgaggtctcaaccattggaaggattcaccatgtcaatgtggtgcgtctggtcgggttttgctctgaagaaatgaggagggcacttgtgtacgagtacatgcctcgaggctctcttgacaagtacatcttctcgtcagagaagagtttctcctgggataagctgaatgagatcgctttgggcattgcaagagggatcaactacctgcatcagggctgcgagatgcagattctgcactttgacattaaacctcacaacatccttcttgacgataactttgtcccaaaggttgctgatttcggtcttgcgaagctatacccaagggataagagcttcgtccctgtgagcgctgcacgaggaaccgtgggctacatagctcccgagatgatctctcggagcttcggtgtcatatcaagcaaatccgatgtttatagcttcggaatgctactattggagatggctggaggaagaaggaatgcagatccaaatgcagcaaactcaagtcaagcttattatccatcacgggtgtacagggagctgactcggcgagaaacaagcgagatctctgacattgctgatatgcatgaactagagaagaagctttgcattgttggattgtggtgcattcagatgaggtcatgtgatcgaccgacgatgagcgaggtgatagagatgcttgaaggtggcagtgatgaactgcaggttcctccaaggccattcttctgtgatgatgagcgattccctggagtggagtcttacaatatgccatctgatctaactgcaatctccgaggagcatgaggacgacgacgacgaaagcatatgtctgttcgaaagctaccagtaacttagtagcaagtacatttatgatgattgtttttacttaatttgtatgcccgttttgctgtctaaagttcaaatatgctgagatcgatatagtttttatgtttattgtaagtttgtagcacatataataaagtgagagcttgtaatatttaggagtgtatgcttaatctccacaagacagtattatgaataatcttctct

SEQ ID NO: 49 - protein, 706 aa, Oryza sativa
MAKSNASRASATRRKFYFLQKSLLVSSLLAVVAADVVGAGPNQQCFPSSCGDLGNISYPFRLASDSRPCVGTLRPWYNLSCSSGRATIQINTRTYYVTSINYTGEIFSVVDATLQDDDTNGTSCPLPRSDHLPYIDYWPPYLGESSTDSYGFVYLATASDTWACFVNCSRARTDTMPWYRPVTCLLPNNSFVFVSFDDCAVGELQPSCRYLAMIPVDRWNLPDNSSQLQNASYTDIIGFIRKGFSVRFPYRPDQYQSPRMSARECLKDSNRYFKERISHPSILNLTRAIFWSETNSEVDCGYEVAPQKDRIFLGTIVSAIDIIKFHFVLFRLVLGSLVVFIFLAHKYWKTGITIDAVEKFLRMQQMIGPTRFAYTDIIAITSHFRDKLGQGGYGSVYKGVLLPGNVHIAVKMLTGSSSCNGDEFISEVSTIGRIHHVNVVRLVGFCSEEMRRALVYEYMPRGSLDKYIFSSEKSFSWDKLNEIALGIARGINYLHQGCEMQILHFDIKPHNILLDDNFVPKVADFGLAKLYPRDKSFVPVSAARGTVGYIAPEMISRSFGVISSKSDVYSFGMLLLEMAGGRRNADPNAANSSQAYYPSRVYRELTRRETSEISDIADMHELEKKLCIVGLWCIQMRSCDRPTMSEVIEMLEGGSDELQVPPRPFFCDDERFPGVESYNMPSDLTAISEEHEDDDDESICLFESYQ

SEQ ID NO: 50 - DNA, 4699 bp, Oryza sativa
gttttggtggtggtgggagatggacgcggcgggggagatccagaaggtggcgagcatgcggctaggggggagcatgaggggggacagcgggtcgatgtggaggagaggggacgacgtgttctcgaggtcgtcgagggaggaggacgacgaggaggcgctgcggtgggcggcgctcgagaagctgcccacctacgaccgcgtgcgccgcgccatcctgccgctcggtggcgacgacggcgccggggacggaggagggaagggcgtcgtggacgtgcacgggctcggcccgcgcgagcgccgcgcgctcctcgagcgcctcgtgcgcgtcgccgacgaggacaacgagaagttcctcctcaagctcaaggaccgcgtcgaccgggtggggatcgacatgccgacgatcgaggtgcggttcgagcacctggaggcggaggcggaggtccgcgtcggcaacagcggcctccccaccgtcctcaactccatcaccaacaccctcgaggaagccggcaacgcgctcggcattctgcccaaccggaagcagaccatgcccgtcctccacgacgtcagcggcatcatcaagccccgcaggatgactctgctgttaggcccaccggggtcaggcaagaccaccttgctgctcgcgttggccggaaggctcggcaaagatctcaaggcttcaggaaaagtgacctacaacgggcacggcatggaggaattcgtgccggagaggacggcggcttacatcagccagcacgacctccacatcggagagatgaccgtcagggagacacttgccttctcggcacgatgccagggtgttggcagtcgctttgatatgttgactgagctgtcaaggcgagagaaggcagcgaacattaagcctgacgccgatatcgatgcattcatgaaggcggctgcaatgggaggacaggaggcaaacgtgaacactgactatatactgaagatattaggactagagatatgcgctgacacgatggttggggacgagatgctgaggggcatctcaggtgggcaaagaaagcgtgttacgactggtgagatgctggttgggccagccagggcgctcttcatggacgagatctcaactgggcttgacagctccactacattccagatagtgaattcgcttaggcaaactgtccacatcctcggtggcacagctgttatctccctgctgcagccggcgcctgagacttacaacttgtttgatgatatcatcctcctctcagacggtcagattgtgtaccagggcccccgagaggatgtgcttgaattcttcgagtccacggggtttaagtgtcctgacaggaagggtgttgccgacttcttgcaagaagtgacttctaagaaagatcaaaggcagtactgggcgaggcatgacaagccctacaggtttgtgacggttaaggaatttgtgagtgcattccagtcgttccacacagggagagctatagcaaacgaacttgctgttccgtttgataagagtaagagccatcctgccgcactggctaccacaaggtacggtgctcctggcaaggagctgctgaaggcaaatattgacagggagattctcctcatgaagaggaactctttcgtctacatgttcagaaccttccagttgatggtggtgtcactcattgcaatgacactcttcttccgtacgaaaatgaaacgtgattctgtgaccagcgggggcatctacatgggcgcactcttctttggtgtgcttatgatcatgttcaatggtttctcagagcttgcgctcactgtctttaagttgcctgttttcttcaagcagagggatctccttttttatcctgcatggtcgtacactataccctcatggattctcaagatcccaatcacgtttattgaggttggtgggtatgtgttcttaacatactacgtcattgggtttgactcaaacgtgggcagcttcttcaagcagtatttgctcatgttagcaatcaatcagatggcgggatcacttttccgattcattggtggggcagcgaggaacatgattgttgcaaatgtctttgcatcattcatgctgctaatttttatggtattgggtggattcattctagcaagagagcaagtgaagaaatggtggatttggggctactggatatccccgatgatgtacgcccagaatgccatctcagttaatgaactcatggggcacagctggaacaaaattgtgaatagctctgcctccaatgagacccttggtgtgcaagtcctcaagtcccgtggagtattccctgaagccaggtggtattggattgggtttggtgcaatgatcggcttcaccatccttttcaatgctctcttcacccttgcccttacatacctcaggccatatggaaattcccgtcagtcagtatcagaagaggaaatgaaagagaagcgtgccaatctgaatggtgagattgtgggtgacgttcacttgtcatctggaagtacgcgtaggccaatgggaaacggcactgaaaatgattcaacaattgttgatgatgatactgaggttactcaaagggggatggttctcccatttactccgctttcactcagctttgacaatgtcagatattctgttgacatgccacaggaaatgaaagcacaaggtgtagctgatgaccggttggagctcctcaaaggtgttagtggttcattcaggccaggggtgttgactgcactaatgggtgtcagtggtgctggcaagacaacactgatggatgtattggctgggagaaagaccggtgggtacattgaaggaagcatcaacatttcaggatatccaaagaaacaagagacttttgcacgtgtgtctggatactgtgagcagaacgatatccactcaccgcaggtcacagtctatgagtcgctacttttctcagcatggctccgtcttcctgaggatgtagattccaacactagaaagatgttcattgaggaggtgatggagcttgtggagctcaagtcactgagagatgctttggttgggcttcctggagtgaatggtctgtccactgaacaaagaaagaggctaacaatcgcagtggagcttgttgcaaacccttcgattatattcatggacgagccaacctcagggcttgatgcacgagcagctgcaattgtgatgaggacagtgaggaacactgttaatactggcagaactgtggtgtgcacaattcatcagcctagcattgacatatttgaagcatttgatgagcttttcctgatgaagcgaggtggtgaagagatctatgctggtccactaggccatcattcttcggagctgatcaagtattttgagagtatcccaggggtcagcaaaatcaaagatggctataacccagcaacatggatgttggaggtgacaacaattggtcaagagcaggcacttggtgttgattttagtgatatatacaagaagtctgaactttaccagagcaacaaggccttgataaaggacctgagccaaccagcccccgattcaagtgacctgtatttccctacccaatattctcagtcttctttaacacaatgcatggcttgcctgtggaagcaaaacctgtcatactggaggaaccctccttacaatgccgttaagttctttttcactactgtcattgctcttctctttggtaccatcttctgggaccttggcggcaaagtgacgaagtcacaagacttgttcaatgccatggggtcaatgtatgcagcagtgctgttcatcggtgtcatgaactgtacatctgttcagccagtggtggccgtggagcggacagtcttttaccgtgaaagggctgccggcatgtactcggcgtttccatatgcatttggccaggttgtcattgagatcccatacacactggttcaggctactgtatacgggatcatagtgtatgcgatgattgggttcgagtggacggctgccaagttcttctggtacctcttcttcatggtcttcacgctcctctacttcacattctacggcatgatggcggtcggcctgacaccgaactaccacattgcctcgatcgtctcatcggcgttctacgccatctggaatctcttctccggcttcgtcatcccccgacctagagtcccaatctggtggagatggtattgctgggcgtgccccgtcgcgtggacgctgtacggcctcgtcgtctcccagttcggtgacatcgagacgccgatggaagacggcacccctgtgaaggtgtttgtggagaactacttcggcttcaagcacagctggttgggctgggtggccaccgtggtcgctgccttcgctttcctcttcgcttccttgtttggcttcgctatcatgaagttcaacttccagaagagatgatgatgacaagggatattacattcattgagttgcaaacgctacctgaaatttgtgcatatcattggatctaaaggatttttttttgttgccattagaatattgtaaatcataccggcctttcccccttatttttatagaaagattgtactactgttacacctagtaattttgttattagtacccttctttttatagaaagatggtactacttttatttttaatttttatatggggttgtctagtgttcagttgactgaaaacttagaaaatctcagtcacattttgctcgaaaaaaaaaaaaaaaaa

SEQ ID NO: 51 - protein, 1456 aa, Oryza sativa
MDAAGEIQKVASMRLGGSMRGDSGSMWRRGDDVFSRSSREEDDEEALRWAALEKLPTYDRVRRAILPLGGDDGAGDGGGKGVVDVHGLGPRERRALLERLVRVADEDNEKFLLKLKDRVDRVGIDMPTIEVRFEHLEAEAEVRVGNSGLPTVLNSITNTLEEAGNALGILPNRKQTMPVLHDVSGIIKPRRMTLLLGPPGSGKTTLLLALAGRLGKDLKASGKVTYNGHGMEEFVPERTAAYISQHDLHIGEMTVRETLAFSARCQGVGSRFDMLTELSRREKAANIKPDADIDAFMKAAAMGGQEANVNTDYILKILGLEICADTMVGDEMLRGISGGQRKRVTTGEMLVGPARALFMDEISTGLDSSTTFQIVNSLRQTVHILGGTAVISLLQPAPETYNLFDDIILLSDGQIVYQGPREDVLEFFESTGFKCPDRKGVADFLQEVTSKKDQRQYWARHDKPYRFVTVKEFVSAFQSFHTGRAIANELAVPFDKSKSHPAALATTRYGAPGKELLKANIDREILLMKRNSFVYMFRTFQLMVVSLIAMTLFFRTKMKRDSVTSGGIYMGALFFGVLMIMFNGFSELALTVFKLPVFFKQRDLLFYPAWSYTIPSWILKIPITFIEVGGYVFLTYYVIGFDSNVGSFFKQYLLMLAINQMAGSLFRFIGGAARNMIVANVFASFMLLIFMVLGGFILAREQVKKWWIWGYWISPMMYAQNAISVNELMGHSWNKIVNSSASNETLGVQVLKSRGVFPEARWYWIGFGAMIGFTILFNALFTLALTYLRPYGNSRQSVSEEEMKEKRANLNGEIVGDVHLSSGSTRRPMGNGTENDSTIVDDDTEVTQRGMVLPFTPLSLSFDNVRYSVDMPQEMKAQGVADDRLELLKGVSGSFRPGVLTALMGVSGAGKTTLMDVLAGRKTGGYIEGSINISGYPKKQETFARVSGYCEQNDIHSPQVTVYESLLFSAWLRLPEDVDSNTRKMFIEEVMELVELKSLRDALVGLPGVNGLSTEQRKRLTIAVELVANPSIIFMDEPTSGLDARAAAIVMRTVRNTVNTGRTVVCTIHQPSIDIFEAFDELFLMKRGGEEIYAGPLGHHSSELIKYFESIPGVSKIKDGYNPATWMLEVTTIGQEQALGVDFSDIYKKSELYQSNKALIKDLSQPAPDSSDLYFPTQYSQSSLTQCMACLWKQNLSYWRNPPYNAVKFFFTTVIALLFGTIFWDLGGKVTKSQDLFNAMGSMYAAVLFIGVMNCTSVQPVVAVERTVFYRERAAGMYSAFPYAFGQVVIEIPYTLVQATVYGIIVYAMIGFEWTAAKFFWYLFFMVFTLLYFTFYGMMAVGLTPNYHIASIVSSAFYAIWNLFSGFVIPRPRVPIWWRWYCWACPVAWTLYGLVVSQFGDIETPMEDGTPVKVFVENYFGFKHSWLGWVATVVAAFAFLFASLFGFAIMKFNFQK

SEQ ID NO: 52 - DNA, 1601 bp, Oryza sativa
agcgtctctcttcatcctaatcacctcgatcattcgctacgtttttgcttgttcagagcaacgcatcgcatcatgcctcgtccacctgaacctgtgcacgtgctgcttcttgctgccatcgcagtgcaagtgttcgtccggtgcacagcacaagctgcgagtgatcagaagccactagtctccaggctcgccaaggattacaacacctcactctacaccatctccgtcaagaacggcgcgccgccgctcgtcgtcgacctcgccggcgcgctcgtctggtcgacgtgcccgtccacgcactccacggtgccatgccagtccgccgcgtgcgacgcggtcaaccggcagcagcctcgccgctgccggtacgtcgacggcggctggttctgggccggccgcgaaccggggtcgcgctgcgcctgcaccgcccacccgttcaatccggtcaccggcgagtgctccaccggcgatctgacgacattcaccatgtcggcgaacacgaccaacggcaccgacctgctgtacccggagtcgttcaccgccgtcggcgcgtgcgcgccggagcggctgctggcgtcgccgtcgctgccgcaggcggccgccggcgtcgcggggttctccgggacgacgccgctctcgctgccgtcgcagctcgccgcgcagcgccggttcggcagcacgttcgccctgtgcctgccggtgttcgcgacgttcggcgacacgccggtgtacctgcccaactacaacccgtacgggcccttcgactacaccaagatgctccggcgaaccccgttcctgacgaacccgaggaggaacggcggttactacctccccgtaaaacgcatctccgtgtcgtggcgcgggcccggcgacgtcccggtgtccctgcccgccggcgcgctcgacctcaacgcccgcacgggccgcggcggcgtcgtgctcagcaccacgacgccgtacgcgatcatgcgcaccgacgtgttccgcgccttcggcaaggcgttcgacacagtcgtgaccagaggaacggaaagcagaatggcgagggtggccaggcagaagcagttcgagctttgttacggcggcgcaggcgacaccatgttgtcattccctatgatgaagcggacgggcttcgacgcgccggcgatcaccctggagttggacgccggagccacgggtaactggacgatactgaacggcaactacctggtacgcgagacgtgcgttggggtcgtggagatggggccggaaggcatgccggtggacggcgagccggcggtggtgctcggcgggatgcagttggagaacatcctgatggtgttcgatctggacaaacgcacgctcggcttcagcaggctattggaatgggacctgacgaattgttacagcgcaagctttttgtgaggaaataactttatcgtgtctcaggcgttttccaatttccagtgcttgtagtcattgtactcaaacttgagtagtatacattggaacagaataagctgtcacgtaccagccttgatgaatcctgcagggatgaaacttttgttgctgaagctcaaaattcaaaagtaatcgatctaaacttgttcaaaaaaaaaaat

SEQ ID NO: 53 - protein, 443 aa, Oryza sativa
MPRPPEPVHVLLLAAIAVQVFVRCTAQAASDQKPLVSRLAKDYNTSLYTISVKNGAPPLVVDLAGALVWSTCPSTHSTVPCQSAACDAVNRQQPRRCRYVDGGWFWAGREPGSRCACTAHPFNPVTGECSTGDLTTFTMSANTTNGTDLLYPESFTAVGACAPERLLASPSLPQAAAGVAGFSGTTPLSLPSQLAAQRRFGSTFALCLPVFATFGDTPVYLPNYNPYGPFDYTKMLRRTPFLTNPRRNGGYYLPVKRISVSWRGPGDVPVSLPAGALDLNARTGRGGVVLSTTTPYAIMRTDVFRAFGKAFDTVVTRGTESRMARVARQKQFELCYGGAGDTMLSFPMMKRTGFDAPAITLELDAGATGNWTILNGNYLVRETCVGVVEMGPEGMPVDGEPAVVLGGMQLENILMVFDLDKRTLGFSRLLEWDLTNCYSASFL

SEQ ID NO: 54 - DNA, 1389 bp, Oryza sativa
atggcctccaccgccatggatcaggtcgcgtgctggtcgatctgcgccttcttggctctcctgctcctcgtcaggatcgggggcaagcgcgggcgcggcggcgacggcgcgcgcctgcgccagccaccgcccggcccgtggcggctgccggtcatcggcaacctccaccagctgatgctccgcggcccgctcgtccaccgcaccatggcggacctggcgcgcggcctcgacgacgcgccgctcatgcgcctccagctcggcggcgtccccgtcgtcgtcgcgtcctcccccgacgccgcccgcgaggtgacgtgcacgcacgacgccgccttcgcgtcgcgtccgtggccgcccaccgtgcgccggctgcgcccccaccgcgagggcgtggtgttcgccccctacggcgccatgtggcggcagctccgcaaggtgtgcatcgtggagatgctcagcgcccggcgcgtgcgctcgttccgccgcgtgcgtgaggaggaggccgccaacctcgccgcggccgtcgccgcctcgttgtcgtcgccaccggcccgccgcgacgccgtgaacgtcagcgcgctggtcgccgcggccgtggcggacgcgacgatgcgcgtggtgatcggggacaggttggagaggcgggaggagttcctggagtcgatgacggaggcggtgaggagcttcacggggttcagcctggacgacctgttcccgtcgtcgaggatcgccgccgccgtcggcggcatgacgcgccgcgcggaggcgagccaccggaaggggaacgagctgatcgagagcgccatccggcagcacgagcaggtaagggacgccatggctgcgcagggtggcggcggcgccatggaggaggacctgctggacactctcctcaggatccagaaggaaggtgccctcgacatgcctctcaccatggacaatatcaaagcagttatccaggagactctaaggttgcatcctgtggtaccattgcttcttccaagagagtgtctccatgcgtgcaaggtcatgggctacgacgtgcctaaaggcaccaccgtgtttgtgaacatatgggcaattaacagagaccccaagcattgggatgaccctgaggtgttcaagccagagcggttcgatgatggcaagatcgacttcaaaggtgcaaactttgagtatattccgtttggtgctggtaggaggagttgccccggggtgacattcgggcatgccaccgtggagctcatgcttgctacgctcttataccactttaaatgggagcttcttgaaggagttgcgccgaacgaactagacatgacggaggagataggcatcaacgtgggaaggaagaatccactttggttgtgtcccattgttcgtgtgcccttgcagtga

SEQ ID NO: 55 - protein, 461 aa, Oryza sativa
MASTAMDQVACWSICAFLALLLLVRIGGKRGRGGDGARLRQPPPGPWRLPVIGNLHQLMLRGPLVHRTMADLARGLDDAPLMRLQLGGVPVVVASSPDAAREVTCTHDAAFASRPWPPTVRRLRPHREGVVFAPYGAMWRQLRKVCIVEMLSARRVRSFRRVREEEAANLAAAVAASLSSPPARRDAVNVSALVAAAVADATMRVVIGDRLERREEFLESMTEAVRSFTGFSLDDLFPSSRIAAAVGGMTRRAEASHRKGNELIESAIRQHEQVRDAMAAQGGGGAMEEDLLDTLLRIQKEGALDMPLTMDNIKAVIQETLRLHPVVPLLLPRECLHACKVMGYDVPKGTTVFVNIWAINRDPKHWDDPEVFKPERFDDGKIDFKGANFEYIPFGAGRRSCPGVTFGHATVELMLATLLYHFKWELLEGVAPNELDMTEEIGINVGRKNPLWLCPIVRVPL

SEQ ID NO: 56 - DNA, 2853 bp, Oryza sativa
aacgagaagcaatgcagagttcagaaatgggggtgttttccagcttaggcgtcgtagtgttgctgttactgttagtcgtcgccctggcgccggtgagaccagcgtcgggtcagccattgccgggctgccccgacaggtgcggcaacatcagcgttccctaccccttcggcatcggcgcccgctgcgcccgcgacttcggctacgagctcttctgcaaccacagctacttccctccgcgcctcaccttcttccctccactccccacgcctacatcgatcttggccgggcgccggctgaatctggccagcctgtccatcgccgacggcgaggccgtagctctcgtcaacgtgttccgccagtgctacagcagcagcgagagctacgtcagcgacaacacccgtaactacacggtgtacctgtccctccttggcagcaacacctaccgcgtatccgccgcgaggaaccgcttcgtcgcgctcggctgccccaacctcggctacctcagcgacgacgcgggctactacatcaccggctgcacgtccgtctgccgaccgtcgcagtggaactccgtgtcgccggcggcgtgcaccggcgttgggtgctgccagagcaggataccacccaatgtcacctactacgaggcgtccgttcaaggcttccaggaagcccaggggagaatcttccgcgggaacacgacttcttgccggcacgcgttcgtggtggaggacaggtgggtcgacaccacctaccgggacagcgccgacttcaaccggaccgacgacttcgccgtccccgtcgtgctcgactgggccatccggaacgtcgccaactgcgacatcgccaagcgcaacaggacggactacgggtgcaggagcaccaacagcgattgcgtcgactccaccaatggtgtcgcataccgctgcaagtgctccaatggctacgacggcaacccctaccttgacggtggatgcacaggtatacaatactagacaccttaatacaatgcagatattggttatcaagttaacattgaggattgttcatttgctcgccattcttatattctctgccctcaaataaataacaatcattctgacaagaagtgatgagtttgtttttcctcttccaagatattgacgagtgccaacacttagacaagtacccatgccacggagtctgcacaaatctgctgggaggctataagtgtgattgccctcatggattcagcggagatgccataaaaaatgattgccgtccaaacgacaagttcacattagcactgaaaatagtcacaggtaattttgagacactaaggaggtgtttggttcatggccacaccacacttttgactgccacagtgtgttaggtatatgtttgtttcactgccacagttgtgacttgccacattttttcaataccatgtcctacatgtcatagacttaattttttttgccaactttaacacattttgtggctagcaatttgtccaccacacttttgtggctgctacaacttacctaatgttagttgtggcaaagtgtggccagcaaccaaacacaccctaatgcacctttctctctattgattctccgatttctgatgagtgacattgcaatgccatcttcaggggtcagcgttggtgtgttcttgtcggtgttcatgtgcttttggttgtacttggggctccagaagaggaagctcatcagaacaaagcaaagattcttcgagcagaacggtggagtgatcctccagcagcagatgcactctggtggaggcactggtgggttcaaaatattttccacggaagagctcaagaaggccaccaacaacttcgccgctgaccgtgttctcggccgcggcggtcacggtgttgtctacaagggtgtcctggaggacaacatggtggtggccatcaagaagtccaagatgatggaggaggctcaaaccaaggaatttgctagagaaatgtttattctctcccagatcaatcacaggaatgtcgtcaagctgctcggttgctgcctcgaggtagaagtgcccatgttagtctatgaatttgtctcaaacggcaccctctaccactacatccatggcaaggaacccacaactgacatagcacttgataaccgtcttcggatagccgcaaagtccgccgaggcgctcgcctacatgcattcatcagcttctccaccaatcctccatggagatgtcaagacggctaacatcctacttgatgacaagctcaacgccaaagttgcagattttggagcatccaaactagcaccaactgatgaggctgcaattgccacgttggtgcagggaacttgtgggtacttggaccctgagtacctaatgacatgccagttaaccgataagagcgatgtctacagttttggtgttgtcgtgctggagcttctaaccaggaagaaggcattgtacctagacgggccagaggaagacatgagcttggtgtcacgcttcaccacagcagtgaaggctggtcgtcatcgagagcttatggacagccaagtgaggaaagagatgaacgacgaaatggcaacagagattgcagacctcctcatgcgatgcctaagcatgaacggtgaagaacgaccaacgatgaaagaggtagcagagaggttggagatgttgaggagataccagcagcacccttgggctgaagctaaaggtaatgctgaggagaatcaaagcttgcttggcattgaacatcaaaatccaaattaccaattcaggcagcatgatgttcttgatctggaagaaggaagtacatatacatttagcttgtagataatgttgtttgcgttaatcttttataaatcaatgaattcacat

SEQ ID NO: 57 - protein, 402 aa, Oryza sativa
MSDIAMPSSGVSVGVFLSVFMCFWLYLGLQKRKLIRTKQRFFEQNGGVILQQQMHSGGGTGGFKIFSTEELKKATNNFAADRVLGRGGHGVVYKGVLEDNMVVAIKKSKMMEEAQTKEFAREMFILSQINHRNVVKLLGCCLEVEVPMLVYEFVSNGTLYHYIHGKEPTTDIALDNRLRIAAKSAEALAYMHSSASPPILHGDVKTANILLDDKLNAKVADFGASKLAPTDEAAIATLVQGTCGYLDPEYLMTCQLTDKSDVYSFGVVVLELLTRKKALYLDGPEEDMSLVSRFTTAVKAGRHRELMDSQVRKEMNDEMATEIADLLMRCLSMNGEERPTMKEVAERLEMLRRYQQHPWAEAKGNAEENQSLLGIEHQNPNYQFRQHDVLDLEEGSTYTFSL

SEQ ID NO: 58 - DNA, 1560 bp, Oryza sativa
actcgagctcgaacaatctatatattgtcagagacgcacactttactgatcagctagttagtcccagttctgaagaacaactggaaaaagaaaatcgagctgtaaaaatattagtaccagtgatcagtgacagttcagagcatcaaccatgtcgtccaacaattccatggaggccaacaatggcgatgatgagaagaagcaagagcaggtggtgtgcgtgacgggagcgggaggcttcatcgggtcgtgggtggtgaaggagctcctcctccgcggctaccgcgtgaggggaacagccagggatccccgcaagaacgcccacctgcttgatcttgagggagccaaggagaggctgacactgtgccgcgccgacgtcctggacttcgccagcctacgcgccgcgttcgccgggtgccatggcgtcttccacatcgcctccccggtgtccaaggaccctaatctggtgccggtcgcgattgaggggacgaggaacgtgatgaaggcggcggcggacatgggcgtgcggcgcgtggtgttcacgtcgtcgtacggcgccgtgcacatgaaccccaaccggagccccgacgccgtcctcgacgagtcctgctggagcgaccccgaattctgccagcgagaggacatatactgctacgccaagatgatggcggagaagacggcgacggaggaggcgtcgaggcgtcggctgcagctcgcggtggtggtgccgtgcgtgacggtgggtcccatcctgcagccgtccgtcaacttcagctgccaccacgtcgtccgctacctcaccggcgccgcggccacctaccccaacgccgtcgccgcctacgccgacgtccgcgacgtcgcccgcgcccacgtcctcgtctacgagcaccacggcgcgcgcggccgctacctctgcatcggcaccgtcatccaccgcgccgagctcctccggatgctcaaggagctcttcccccagtaccccgtcacttcaaagtgtgaggatgaggggaatcagatggtgaagccgtacaagttctcgaaccagaggctcagggatttgggtttggagtttactccactgaggaagagcttgcatgaggcgatcgaatgtctgcagcgcaagggtcacctgcctgttgtcacggtggcacaacagcgtgcatgtttgtagaaccaagattttatacacggtgaacttccaagttccaaagataataaaagcagagacatgacagcggcggcatatgcataacaaatttatattttggcggcggcttaaatttgaaattttgtctacctgaagaataaagtaggagtaccatataaagggaagttcagcgtggaagaacccgtactactactactcctagctagccagttcatatcgtaaatctgcatgtgtaacacaagttctttctttggtatgaattacatctgtatctctactttgttcatacttctacgatataaaatgaaaaaaaatattatataataccgatcgagaatgtatctaagaaacaggaatgaaattaagggaggaatagcgcacctctcctctactct

SEQ ID NO: 59 - protein, 339 aa, Oryza sativa
MSSNNSMEANNGDDEKKQEQVVCVTGAGGFIGSWVVKELLLRGYRVRGTARDPRKNAHLLDLEGAKERLTLCRADVLDFASLRAAFAGCHGVFHIASPVSKDPNLVPVAIEGTRNVMKAAADMGVRRVVFTSSYGAVHMNPNRSPDAVLDESCWSDPEFCQREDIYCYAKMMAEKTATEEASRRRLQLAVVVPCVTVGPILQPSVNFSCHHVVRYLTGAAATYPNAVAAYADVRDVARAHVLVYEHHGARGRYLCIGTVIHRAELLRMLKELFPQYPVTSKCEDEGNQMVKPYKFSNQRLRDLGLEFTPLRKSLHEAIECLQRKGHLPVVTVAQQRACL

SEQ ID NO: 60 - DNA, 1949 bp, Oryza sativa
acctcgatcatatcatccataatccttcaagctcttgttggctttgcttaattgcagctgccactagctttgttaggatcaatcacatccatctacgtgtgtagagcgtcgtgacagagagttttgtgatggagcagcttcccaagcgcccggcgaactacgtgccactgagccctgtggggttcctgccgcgcgccaatgccgtctacggcgaccgcacctccgtcatctacggccgcgtccgcttcacctggagccagacctacgcccgctgccgccgcctcgcctcctccctcctctccctcggcgtccgcaaccacgacgtcgtgtcggttttggcgccgaacgtgccggcaatgtacgagatgcacttcgcggtgccgatggccggggcggtgctcaacaccatcaacacgcggctcgacgcgagggcggtggcgggcatcctgcggcactccgaggccaaggtgttcttcgtcgactaccagtacgtgcgcctcgccagcgacgcgctccagatcgtcgccgacgaggggaggcacgtcccgctcgtcgccgtcatcgacgacattgacgtgcccaccggcgtccgcctcggcgagctcgagtacgaggggctggtcgcccgtggcgaccccgccgccgagctgcccagcctcgccgacgagtgggacgccgtcacgctcaactacacgtcgggcaccacgtcggcgcccaagggcgtggtgtacagccaccgcggcgcgtacctgagcaccatgagcttgctcatgtcgtgggtcgtcggcgacgagccggtgtacctgtggacgctgcccatgttccactgcaacgggtggaccttcacctggggcatggcagcgcgcggcggcgtcaacgtctgcatccgcgacgcgcgcgccgcggacatctaccgcgccatcgcgcgccacggcgtcacccacctgtgctgcgcgccggtggtgttcaacatcctgctcgagggcggcgaggcggcggcgaagcagctcgcggccccggtccacgtgctcaccggcggggcgccaccgccggccgccctcctcgagcgcgtcgagcggatcggcttccgcgtgacgcacgcgtacgggctcaccgaggccaccggcccggcgctggcgtgcgagtggcgcgcgcagtgggaccgcctgccgctgccggagcgcgcgcggctcaagtcccggcagggcgtcagcgtcctgtccctcgccgacgccgacgtcaaggacgccaagacgatggcgagagtgccgcgcgacggcaagaccgtcggcgagatcgtgctccgcggcagcagcatcatgaagggctacctcaacaacccggaggcgaacagcgacgccttcaagggcgagtggttcctgaccggcgacgtcggcgtcgtgcacgccgacggctacatcgagatcaaggacaggtccaaggacgtgatcatcagcggcggcgagaacatctgcagcaaggaggtggaggaggtgctgttccagcaccccgccgtcgccgacgcggcggtggtcgccatgccgcacccgcactggggcgagacgccgtgcgcgttcgtcgtggcgagggacaaggcggccggggtgtgcgaggacgacgtcgtcgcgttctgccgcaagcacatggcgcggttcatggtgcccaagaaggtggtcgtctacgacgccatcccgaggaacggcaacggcaaggtcgagaagaacttgctccgggaggcggccaagaagctggcgccggcggccgtgccggcgcagaagacgaaggtgaagacgacgacgacgacggtcggcggccgccgcggcgagcacccggtggcgcatgtcatggccgtgtcaaggctttagggcaatcaccaaaatgtcaccaatctttatcggtgaaccggtgatatcaccttttgcacgtaggaatttggcactacgcctgcc

SEQ ID NO: 61 - protein, 578 aa, Oryza sativa
MEQLPKRPANYVPLSPVGFLPRANAVYGDRTSVIYGRVRFTWSQTYARCRRLASSLLSLGVRNHDVVSVLAPNVPAMYEMHFAVPMAGAVLNTINTRLDARAVAGILRHSEAKVFFVDYQYVRLASDALQIVADEGRHVPLVAVIDDIDVPTGVRLGELEYEGLVARGDPAAELPSLADEWDAVTLNYTSGTTSAPKGVVYSHRGAYLSTMSLLMSWVVGDEPVYLWTLPMFHCNGWTFTWGMAARGGVNVCIRDARAADIYRAIARHGVTHLCCAPVVFNILLEGGEAAAKQLAAPVHVLTGGAPPPAALLERVERIGFRVTHAYGLTEATGPALACEWRAQWDRLPLPERARLKSRQGVSVLSLADADVKDAKTMARVPRDGKTVGEIVLRGSSIMKGYLNNPEANSDAFKGEWFLTGDVGVVHADGYIEIKDRSKDVIISGGENICSKEVEEVLFQHPAVADAAVVAMPHPHWGETPCAFVVARDKAAGVCEDDVVAFCRKHMARFMVPKKVVVYDAIPRNGNGKVEKNLLREAAKKLAPAAVPAQKTKVKTTTTTVGGRRGEHPVAHVMAVSRL

SEQ ID NO: 62 - DNA, 838 bp, Oryza sativa
aataattagcctgtgatccctcatccctgaacttcccagagagggagagctcagagaaaaagggcgaggcatggcatccagctccaaactgtctgctctcttcttgacggcaattctgctctgcctcatctgcacgaggagccaagcagcaaggcctgaaccgggatccagtggccacaaatcacagggtgttgttgcctccagtattgcccatcagaagagtgttggtagttctggaatcggtgtggaaatgcatcagggagaacctgatcaggcagtggagtgcaagggaggggaagcagaggaagagtgcctgatgaggaggacactagttgctcacaccgactacatctacacccaagggaatcacaactagtgtagcacagtagctgtgcaaatatatgcaccagtgctctttggcacaagtttctgcccagggtagtttggaacacgggaattttccacgattcttggaggaatgaactagctctgacgcacagtttctacaagatcttctgtgaattcctgcgttcaaacaagcaaagaagaaaggcttgatgaggcaaacggatatcgatcttctgcagttcatttctgtggattgtaccaacccccccccccccccctttttttttttgcggggagtggattgtaccaactttgtagtggactatctgtacatttctcgctccttgttcttcagcccgtatatccattctcgacttccggccatcaccttcagatagtacatggaactttgggatgtaagcactgtagatactgaacttatgtatccatcttgcctcagctataataaaattacagtttctaatatcta

SEQ ID NO: 63 - protein, 101 aa, Oryza sativa
MASSSKLSALFLTAILLCLICTRSQAARPEPGSSGHKSQGVVASSIAHQKSVGSSGIGVEMHQGEPDQAVECKGGEAEEECLMRRTLVAHTDYIYTQGNHN

SEQ ID NO: 64 - DNA, 1606 bp, Oryza sativa
gtattgaactcttctcagctcaaagccttacaccacaacacgcagctgttctcgctgggcttctcttcttgcgctgcggtgatcgatcgagagcttgggatggcgctgctggcgcggagggcgcggaaggcggtgatggcgaaggcgccggcgccgctgctgcagaagaggggtggcggcgcggcggcggagctggcgatcccggcgcacttccggtgcccgatctcgctggacctgatgcgcgacccggtgacggcgccgacggggatcacgtacgacagggaggggatcgaggcgtggctggacaccgggcgcgcggtgtgccccgtcacccacgcgccgctccggcacgaggacctcgtccccaaccacgccatccgccgcgtcatccaggactggtgcgtcgccaaccggtcccgcggcgtggagcgcatccccacgcccaagatccccgtcacgcccgtgcaggcctccgagctgctgttcgacgtcgcggagtcggcggcgcggcgcggcgcggcggggcgcgccgccggggcggtcgccagggtccgggcgctcgcgagggacagcgagcggaaccggcggtgcttcgtgtccgtcggcacggggcgcgtgctggccgcggcgttcgagtctctcgccgccgccggggaggcgggcgttctcgaggacgtcctggcggcattggtctgcatgatgccgttggacgaggaggcggccagggtcttggcctcgtctagctcgatgggttcactcgtcgccattgccaagcacgggagcttggccggaaggctgaacgctgtgctggcgatcaaggaggccgtgtcgcgggacggagcgttcgtggacctggcggatgacaaggtcgacaaggtcgtcgacgcgctggtcgtgatcatcaaggctccgatctgcccgcaggccaccaaggctgccatggtcgccacctaccacctggcgagctccgacgagcgcgtcgctgcgagggtagcatccacggggctcgtcccaacgctcatcgaggccctcgtagacgccgacaagagcgtgtccgagaaggccctggcggtgctcgacgcaatgctcgcctcggaggaaggccgcgcgagcgcgcggggccacgccctcgcaatgccggccctcgtgaagaagatgttccgcgtgtccgacgtggccaccgagctcgccgtgtcggcgatgtggcggctcggctgcaaggcctcctccggcgacgaggaggccgccgcgacggggtgcctggtcgaggcgctgcgtgtgggcgcgttccagaagcttctcctcctcctgcaggtgggctgcagggacgcgaccaaggagaaggccactgagctgctcaagatgctcaacaagcacaaagggttgggggagtgtgtcgacgctgtggatttcagagggctcaataggctgtcatgaattgagatcagtgttcagaatcattgtaaaaatagttgcgagcagctaggaaatgcagattgtaaaaatagttgatggggatttttgcggatgtgctttccatgctagattgtaaatctaattgcaaaaacaagtttcctactttcctcactgtaaatattttgcatgt

SEQ ID NO: 65 - protein, 445 aa, Oryza sativa
MALLARRARKAVMAKAPAPLLQKRGGGAAAELAIPAHFRCPISLDLMRDPVTAPTGITYDREGIEAWLDTGRAVCPVTHAPLRHEDLVPNHAIRRVIQDWCVANRSRGVERIPTPKIPVTPVQASELLFDVAESAARRGAAGRAAGAVARVRALARDSERNRRCFVSVGTGRVLAAAFESLAAAGEAGVLEDVLAALVCMMPLDEEAARVLASSSSMGSLVAIAKHGSLAGRLNAVLAIKEAVSRDGAFVDLADDKVDKVVDALVVIIKAPICPQATKAAMVATYHLASSDERVAARVASTGLVPTLIEALVDADKSVSEKALAVLDAMLASEEGRASARGHALAMPALVKKMFRVSDVATELAVSAMWRLGCKASSGDEEAAATGCLVEALRVGAFQKLLLLLQVGCRDATKEKATELLKMLNKHKGLGECVDAVDFRGLNRLS

SEQ ID NO: 66 - DNA, 1515 bp, Oryza sativa
atcacaaactcatctagctagcgggctagcactggcactggcactggcactggcactggcaccggagagagttaacagacacagtcaacagatacttcttgcacatcggttaatcaagcaaccggtcgagatgcaaaatctagccttcgtcatagtcacattgcttgcagcgcttgccatttctcgctgcaatgctgcggcgaccgtccggatgcagctcacgcacgccgacgccgggcgcggcctggccgcgcgggagctgatgcagcgcatggcgctgcgcagcaaggcccgcgcagcgcggcggctctcgagctcagcgagcgcgccggtatcccccgggacctacgacaacggcgtccctacgacggagtacctggtgcacttggccatcggcacgccgccgcagcccgtgcagctgacgctcgacaccggcagcgacctcatctggacgcagtgccagccgtgccccgcatgcttcgaccaggctctcccttacttcgacccgtcgacatcctccacgctctcgctgacttcctgcgactccacgctgtgccagggcctgccggttgcgtcgtgcggcagcccaaagttctggccgaaccagacatgcgtatacacgtactcctacggcgacaagtcggtgacgacaggcttcctcgaagtggacaagttcacgttcgtaggcgccggcgcgtccgtgcccggcgtggcgttcggctgcggcctctttaacaacggggttttcaagtccaacgagaccggcatcgccgggttcggccgcggcccactgtccctgccgtcgcagctcaaagtgggcaacttctcccactgcttcaccgccgtaaacggattgaaaccgagcactgtcctgctcgacctgccggccgatctctacaagagtggccgcggcgccgtccagtccacccctctaatccagaatcctgccaatccaactttttactacctctcgctgaagggcatcaccgtcgggtcgacgaggctgccggtgccggagtccgagttcgctctaaagaacgggaccggcggaacgatcatcgactccggcacggccatgacgtcgctgccgacgcgtgtttaccggctcgtccgtgacgcgttcgccgcgcaggtgaagcttcccgtggtgtccggcaacacgacggatccctacttctgtttgtcggcgccgctgcgggcgaaaccgtacgtgccgaagatggtgctgcacttcgagggcgcgacgatggacctgccccgggagaactacgtgttcgaggtcgaggacgcgggcagcagtatcctctgccttgccattattgaaggcggagaggtgaccaccataggcaatttccagcagcagaacatgcacgtactctatgatctgcagaatagcaagctgtccttcgtccctgctcagtgcgacaaactttagtctcgcattgctctgaccataatttgttatagctgaatagtttggatttgagcaactctatgccgtacagacatccatgt

SEQ ID NO: 67 - protein, 434 aa, Oryza sativa
MQNLAFVIVTLLAALAISRCNAAATVRMQLTHADAGRGLAARELMQRMALRSKARAARRLSSSASAPVSPGTYDNGVPTTEYLVHLAIGTPPQPVQLTLDTGSDLIWTQCQPCPACFDQALPYFDPSTSSTLSLTSCDSTLCQGLPVASCGSPKFWPNQTCVYTYSYGDKSVTTGFLEVDKFTFVGAGASVPGVAFGCGLFNNGVFKSNETGIAGFGRGPLSLPSQLKVGNFSHCFTAVNGLKPSTVLLDLPADLYKSGRGAVQSTPLIQNPANPTFYYLSLKGITVGSTRLPVPESEFALKNGTGGTIIDSGTAMTSLPTRVYRLVRDAFAAQVKLPVVSGNTTDPYFCLSAPLRAKPYVPKMVLHFEGATMDLPRENYVFEVEDAGSSILCLAIIEGGEVTTIGNFQQQNMHVLYDLQNSKLSFVPAQCDKL

SEQ ID NO: 68 - DNA, 2907 bp, Oryza sativa
ttggagcttagctgctgcgaagttacacggctacgcaccgttcttgctaactatatacgatttcttatacacttatttcttttgaggcatagcgtgctggctaagtataggtaggtagctagctctgccgctgcttataaaaaggcagtgctgcacggtggtgagcgtacctagctagagcatagagaagcaggaaagttttggagatcgatcgatggcacagcagcaagccggtgcaagaggcagcaagctggagatcgtcgccgcccggggaggaagtggcggcagcagcagcgccggcgatgcggaggcgccgccgttggacgtcctgaggcaggactccctctaccgcgacgcgacgcggccggcccacggccaccatggacaggagagctggatgaggacgctgcggctggggttccagtgcgtgggaatcctgcacgccgacctcggcacgtcgccgctctacgtgtaccagaacacattcaagtacggcatcaagcacgaggacgacatcatcggcgtcctctccctcatcatctacagcttcgtgctattcaccatggtcaagatcgtcttcatcgccctccacgccaacgacgatggcgacggtgggacatttgctctgtactcgttgatctcgcggtacgccaaggtgtgcctgatcccaaaccagcaagccgaggatgagctggtgacgaggtacaacgaccacgggaagccgccggcgacgctgcggagggcgcagtggatgaagagccagctcgagaagaagcccgccaagattgccgtcttcttcctcaccatcttcgccaccgcgctggccatcagcgactgtgtgctaaacccttcagtctctgtactttcggcggtcaacggcttgaaacttagagcacctcatctgacaacagacgaagtggtctggatcacggtgggaatactggtggtgtttttcgcagtgcaacggtttggcactgacaagattggctacacatttgccccggttgttgttgtgtggctgttactcatctcagggattggcatctatgacttggtcaagtacgatgtcggtgtcttgagggcgttcaaccccaaatatatcatcgattatttccgacgaaataagaaggacggatgggtccagctcggtgaagttcttcttacatttaccggcacagaagctctctttgctgatttaggatacttcagcatcaaatcaattcagttaagctctacctttgtcttgctcccatcagtgttatgcacctacattgggcaagcagcatacctaaggaaacacatggatcagcagcacatacaaaacgctttcttcaattccattccaagacctctgttctggccaatgttcgttctcgctatcatgacgtcagtcatcggttgccaagccatggtgtcttgtgcctttgtaaccatgtcacacttgcagacactgaattgtttcccacggattaagatactgcacacatcaaggcgttattcaggacagctgtacagtcctgaagtgaacttcttcctctgcctactttcctgtgtaatcaccttaagtttcaggacgacaggtttcattgtcaaagcacatgaaatttgtgtggtccttgtgatggttatcacaactatcctgatgactatagtcatgcttctcgtatggaaagtaaatatttggtggatcgttctattctttgtcgtcttcatgtcaacggagaccgtctacctatcagcagttctctacaagttcacaaaaggaccatacatgcccttggctatgtcagctgttctaatggtgatcatgttcgtgtggcactacgtgcatgtgaagcgatacaagtttgagcttgaacataccgtatcacctaataaggtcagagagctccttgaacggcgtgatctaaagagggttcctggtgtggggctcttctacactgaattggtgcaaggcatcccaccgatattccctcaccttatcgagaaaatcccgaccattcactcggtgatcgtgttcatctctatgaagcacttgcctatccctcatgtcgatgtctcggagcgcttcctcttccggcaagtggagcccaaggagtgcatggtgtttcgatgtgtcgcacgatatggatatcgggatactctagagatggctgatgactttgtcaccactcttgtcgagtacctccagtactatatccgggacctaaatctatacaacacggttgagccactcaagatgagctgcccaagcattagaattgatagtttttcctgggatagacgaccctcagggcatggcatttatgccgaggagatgcttacaccaatccaatcattttctgagctcacaatgcatcctgttggtatgagcagccgattagcgcaattccaaacaactaagatgagccttgaagagatgttgaagattgaggaagaccaaaagttgatccaacgagaagtggacaatggtgtggtttacatacttggggagagtgaagtggtagcgaaaccacattccaacttgcttaagaaagttgttgtaaactacatattcaactttctgaggaaaaactctcgaaaaggagagaagatgttgtctattccacgccgcaagttgctcaaggttggaatcacgtacgaaatataaacatgccaacaatcagtaagatggtggcttatacacaaggggtgtagatttgtcgagcaagcatatatcatgcatgcagggtttgcttacttgcaaatgtacttggattttgtttgcttgcgtgactctccatgataggaaaaaaaataaaagaattacatgcaaggaggaaaatatgccagcaaaatgaaaacagtcataatcgagaatatcacaatgcgatatatgggttccatatatatagaatttcttttttc

SEQ ID NO: 69 - protein, 811 aa, Oryza sativa
MAQQQAGARGSKLEIVAARGGSGGSSSAGDAEAPPLDVLRQDSLYRDATRPAHGHHGQESWMRTLRLGFQCVGILHADLGTSPLYVYQNTFKYGIKHEDDIIGVLSLIIYSFVLFTMVKIVFIALHANDDGDGGTFALYSLISRYAKVCLIPNQQAEDELVTRYNDHGKPPATLRRAQWMKSQLEKKPAKIAVFFLTIFATALAISDCVLNPSVSVLSAVNGLKLRAPHLTTDEVVWITVGILVVFFAVQRFGTDKIGYTFAPVVVVWLLLISGIGIYDLVKYDVGVLRAFNPKYIIDYFRRNKKDGWVQLGEVLLTFTGTEALFADLGYFSIKSIQLSSTFVLLPSVLCTYIGQAAYLRKHMDQQHIQNAFFNSIPRPLFWPMFVLAIMTSVIGCQAMVSCAFVTMSHLQTLNCFPRIKILHTSRRYSGQLYSPEVNFFLCLLSCVITLSFRTTGFIVKAHEICVVLVMVITTILMTIVMLLVWKVNIWWIVLFFVVFMSTETVYLSAVLYKFTKGPYMPLAMSAVLMVIMFVWHYVHVKRYKFELEHTVSPNKVRELLERRDLKRVPGVGLFYTELVQGIPPIFPHLIEKIPTIHSVIVFISMKHLPIPHVDVSERFLFRQVEPKECMVFRCVARYGYRDTLEMADDFVTTLVEYLQYYIRDLNLYNTVEPLKMSCPSIRIDSFSWDRRPSGHGIYAEEMLTPIQSFSELTMHPVGMSSRLAQFQTTKMSLEEMLKIEEDQKLIQREVDNGVVYILGESEVVAKPHSNLLKKVVVNYIFNFLRKNSRKGEKMLSIPRRKLLKVGITYEI

SEQ ID NO: 70 - DNA, 2769 bp, Oryza sativa
gatatacgtatcattaattgctgggttctacaattaatgttccggtgaactaaacttttctatggacggagggagtaattaagacgataacggaatgtctaataattaaatgacagtgcatgctgtctgtttctttatgtaggattttcatgtagtcctttcgtttaaaaatgcatggtgccgttgacttttcacacaacgtttgactatttgtcttattaaatttttttatataaatatcatttatttctttatgacttgttttattatcaaataaaatataatcttaacttatacatttacatatttatactaaatttttgaataagataaatagttaaacgttatgtgaaaagttaacggcgtcgtacatttttaaatggagggagtacttgataaacattctcacctcacctcacctcccatatatgcctgattttcagggcccatgctaataagcaaatcaccgccgtacccggcctcggaagaaacacgcgaatgggaagcagatggacaacatgaacacacggatgaactaagagagacgacgacaaccatgatcgatggcatcaggacagcactgagatcaatcggagagggagagattagcatctcagcctatgacacttcgttggttgccctcctgaagaggctagatgggggtgatggtcctcagttcccatcaaccatcgactggatcgttcagaatcagctaccggatggttcatggggtgatgcctccttcttcatgatgggagaccggatcatgagcaccctcgcttgtgttgtagcgttgaagtcatggaacatccacaccgataaatgcgagagaggtttgttgtttatccaagaaaatatgtggaggttggcccatgaggaagaagactggatgctagttggatttgagattgccttgccctcgctcctagacatggctaaggacctggatcttgacatcccttacgatgagccagccttgaaagcaatatatgccgagagagaaaggaagcttgccaagattccaagagacgtgctacactctatgccaacaactttacttcatagccttgagggaatggttgacttggactgggaaaagctcctcaagctccggtgtctcgatgggtccttccattgctcccctgcttcgacggctactgctttccagcaaacaggagaccagaaatgctttgaatacctcgatggaatcgtcaaaaagttcaatggaggagttccctgtatctaccctttggatgtgtacgaacgcttatgggccgtcgataggctgacgaggctgggcatatcaaggcacttcacaagtgaaattgaggattgcttagactacattttcaggaactggactccagatggattagctcacacaaagaactgcccggtaaaggatatcgatgacacggccatgggtttccgtctcctccgactttacggataccaagtcgacccatgtgtgttgaagaagttcgaaaaggatggcaagttcttctgcttgcacggggagtccaacccatcctctgtcaccccaatgtacaacacttaccgggcctcccagctcaaatttcctggcgatgacggtgtccttgggcgagctgaggtgttttgccgctcattcctccaagacaggagaggctcaaacagaatgaaggacaagtgggccatcgccaaggatatcccaggcgaggttgagtatgctatggactacccatggaaagcaagtttaccgcgtattgaaacaaggttgtacttggatcaatatggaggtagtggcgatgtatggattgggaaggtcctgcacaggatgactcttttctgcaacgacctgtacctcaaggcagctaaagctgacttcagtaatttccagaaagaatgccgagttgagttgaatggccttagaaggtggtacttgaggagtaatctggagaagtttggagggactgatccacagactacactgatgacatcctacttcttagcttcagccaacatcttcgaggcaaaccgagcagcggaacgtcttggatgggctcgcgtagcgttgcttgccgatgccgtctcctctcacttcaggagaatcgggggaccaaaaaattcgaccagcaatcttgaagagcttatcagccttgttccttttgacgacgcttattctggcagtcttcgtgaagcttggaagcagtggttgatggcatggactgcaaaggagagcagccaggagtcaattgaaggggacacggcaatattgttggttcgtgccatcgagatttttggaggacggcatgttttgaccgggcaaagaccggacctttgggagtattcccagctcgagcagctcacctcctccatctgctgcaaactttccaggagggttcttgcccaggagaatggggaaagtacggagaaagttgaggagatagaccagcaagtggatttggagatgcaggaattgactcggcgcgttctacagggctgcagcgctattaacagactaacccgggagacgtttctccatgtggtgaagagcttctgctatgtcgcctactgctcacctgagacaattgatagccacatcgacaaggtcatattccaagatgtgatttaggaacaaattaccccgactcatctacactccttataaaagagagtagtggtggtgttggttctgccacccccacctccactaccaattcccgacctttatagaataaagatgtgtcttttgtattaagtttgttgtggtgtacctcgtgtttttcc

SEQ ID NO: 71 - protein, 721 aa, Oryza sativa
MLISKSPPYPASEETREWEADGQHEHTDELRETTTTMIDGIRTALRSIGEGEISISAYDTSLVALLKRLDGGDGPQFPSTIDWIVQNQLPDGSWGDASFFMMGDRIMSTLACVVALKSWNIHTDKCERGLLFIQENMWRLAHEEEDWMLVGFEIALPSLLDMAKDLDLDIPYDEPALKAIYAERERKLAKIPRDVLHSMPTTLLHSLEGMVDLDWEKLLKLRCLDGSFHCSPASTATAFQQTGDQKCFEYLDGIVKKFNGGVPCIYPLDVYERLWAVDRLTRLGISRHFTSEIEDCLDYIFRNWTPDGLAHTKNCPVKDIDDTAMGFRLLRLYGYQVDPCVLKKFEKDGKFFCLHGESNPSSVTPMYNTYRASQLKFPGDDGVLGRAEVFCRSFLQDRRGSNRMKDKWAIAKDIPGEVEYAMDYPWKASLPRIETRLYLDQYGGSGDVWIGKVLHRMTLFCNDLYLKAAKADFSNFQKECRVELNGLRRWYLRSNLEKFGGTDPQTTLMTSYFLASANIFEANRAAERLGWARVALLADAVSSHFRRIGGPKNSTSNLEELISLVPFDDAYSGSLREAWKQWLMAWTAKESSQESIEGDTAILLVRAIEIFGGRHVLTGQRPDLWEYSQLEQLTSSICCKLSRRVLAQENGESTEKVEEIDQQVDLEMQELTRRVLQGCSAINRLTRETFLHVVKSFCYVAYCSPETIDSHIDKVIFQDVI

SEQ ID NO: 72 - DNA, 2558 bp, Oryza sativa
ggcttttcctcgtatccatctgggagtctgggaccctacccaccacgcacggccgcggcgcgccagtggccgtccagggtactgggtttcagcggctacagcctatggggaggttctgggtgccggccgcggccgccggaccggtggtctcccgcggcacccgacgcgcttccacaaggcagtacattatggaaacgagttgaccacagaagatgaatctggaggagttgggattgcatccgctccatcaagcatttgagttaccttcaggatgctgggtcgcatagttggctcctcctggagacaccacaatgccactgctacaaacctttcaaccttcttgatgtttaacttcgcctcatcatcaccatctaccagcagcctccatttccacattttgccggcaacagatgagttccagaagaatgaccccaaagctgtacacatccaccttggcagtgatcccgacgttcttgaaccactcaggggcaacatatccgcgggtaccacggatacccgtatatgtctgtgtttggttggttcggagtagtttcgctaagccaaagtctgaaatctttgctatgaaattatcatcaagaaggatattttggggctttatgtcacagtggatgatctgtgtgctgcattcctcatgtaagtatagcagcccccttgcgacaccgagagcaagttgaactcgaagactccacagaggcctgacaccactaaacaggaatctgttgagcgatccattaaccatgaattcatacaccaacagtctctcagttccttcattgcagaatcctagcatccggaccaggttcttatggtacgtccgtccaatggtttggacctccacagcaaactccttttcagtctcatgctgaatcttatcaattttcttgacagcaatgtaagttcctaactcatcttgcagctggcctttgtacacaataccagatgcacctgtgcccaacacctccttgaatccgtccgttgccttctcaagctctgcataactgaaagctttgaggggtaatcctgggtctcgtgatggttgcaatggctggacatcctttctggtgattgtacagtaagtaccgaaaagaagaacagaactcaaggcaaaattcgctatcacagagcctccgagaagcaacgaacttcctaggatccagagcttcttgtcactcttccattttctagactttctgagctctggctgcgaactgttgctctttggcaccttgataagaactgttctctgcactccactccccatgatcccgtttgatagagggagcttcttcttccagcaggtgttttcatggaatacagcaacagcacagaagcaatcaatcaggcagagccgtcgacattcatccatgtctatgggagtgtaccactcatagtcagcctgaggccaatccacattattaaccaagttaaactcatactgtgccatggaagctgcctcatccaaatcacagctttgtagctcgaagtccggtctgcagcctctgtacttcctcacctcatcaaagaacgagtactgctccgggcacacacagcttgtctggttgttgctgccatcaaacatgcagtaactattgaatccacaggtgccactgcctacttttgtctgagcattgcagatgttttcaggttggatgctcactgctgtccatgcctgactcatgctgctgggcttcttcgggtacacatattgcctgaacacaccatctgggtcaagcgtagcacgatggtagtagtcctccatggagcggatcaccccagatgtcatgttgaattgtgttccattcttcatgctcacgtatatcctaccggtagtattgaacaccagattggtgacctgatttgtgacattctcatctatgggtgtggaccaatatgggtcataaaggtttccagatggaactgccatggtataaagtgcagctcgttgagtttccatgttaagaagaaacctgccattggagtaatctgtggtaaggagtcggctgcggagcttcattccaggggacagcgcttgtgtgaccaggatggtgtctgttgggttcttgaaagtttcccagctgatagtagagcctcctgcagcagcaatcacaaaattcccggtgtcgagcatgctggcatagggtgcaccagttgctcctggattccatacctctctattggtgggatctcggagagaaagtacaccagttgaggtaaactggaggatggagccagatggcacttgtatcggctgtggttcttgctcactggtcttggcataccatgttgccgtcttgtcgctgatcttgttgaaccagatggcgaggaggtagaaggaggagttgccatcgatgggccggaatccaaacgcgaagtcgcctgatggcgagagccatgcgttgtttggcccttgggttattaatgatgtgcccaagctgatgttctgagcttgagcagatggggaggacagtagcaccaacaattggagggagagcaagaagagtggaggtgccatattgcttgttctgattattgcttcc

SEQ ID NO: 73 - protein, 155 aa, Oryza sativa
MVVVLHGADHPRCHVELCSILHAHVYPTGSIEHQIGDLICDILIYGCGPIWVIKVSRWNCHGIKCSSLSFHVKKKPAIGVICGKESAAELHSRGQRLCDQDGVCWVLESFPADSRASCSSNHKIPGVEHAGIGCTSCSWIPYLSIGGISERKYTS

SEQ ID NO: 74 - DNA, 1874 bp, Oryza sativa
gtccgtggccgctgttccccacctcccggaggaggagaccacgccaagcgtggacgtggaaatcgcctccccagatcagcagcatctagctgctgctgctgcaccgtcgatggccgtatttcctccggcggccgacgaggaggaggaggaggaggcggtggcggtgttgctgtccggtgagttcttcacgtgctggtcttcgctgtcggagtcgacggatgatgagacgacgaggaggacgaccaccgagtccatgttctacatcccgacgaacgggagtaatgatgttgggaggaggaggaggaaggtccggtcctggagtcgggggagcttcctgggacgtggatcctttgggatggtgttcgaggggatcaccaacgagggtgttttctttgctgtcaaagaagtgtacttagatgatcaagggaaatacgacgatgcacaacagtgtatttttcagcttcagcaggttggtttcgctagatgcttctcttgttgataatatatggagtatatatatttctgttggtaatggtgtattttcagatcataaagcatctactaatttctaataatctgttcaggaaattgcactcctgagtcgtctgcaacacaataacattgtacagtactatggtacagacaaagtaagctcctgatcgatcttgtgatctttgcctttaggggatcttgtggttgttcatctatttgttgaagtaatatgtgttattgtgttgtatataaattcataggttttcttatacatatttcttttaaggttaatatgatcatccattgtgtgacgactgcaggaggactcaaaactttacgtcttcctagaactaatgtcacaaggctctcttgcatccttgtaccagaaatatcgcctgcgaaattctcatgtttcgcgatatacaaaacaaatccttaatgggttgacttacctccacaacagaaacattgttcatcggtaatattcatacgtctgtttgcaccataggcaatttcaacctgtaattttgtagcataaatgggatttcttaattataaattgctcactagatttctcaatttgtcttgcaaaggaataaaatattaattatatactcatgtacttcaatgttcaaaattcttgtagggatgtgaagtgtggcaatatactggtgcataggaatggatctgtgaaacttgccgactttggtcttgctaagcaggtctctgctttctgctgggcagaatctgtatttatgtttgtgttagatctttcagttctttgttactgactttgttctactcttgatttattagttatctctttcagataaacaaattcagcatgcttaaatcatgtgaaggaagtgtttattggatggcacccgaggttgtcaatcccaagaggacatatggaacggcagctgatatatggagtctcggttgcacagtcctggagatgttgacacgtcaactgccttacccaaatttagaatgggcacaagctttatttaagatcggaaggggtgaaccaccagcaatcccaaaatacctttcaaaggaggctcgtgatttcataagccagtgtttgagaccatatccggatgatagaccttctgcatccaaattattggaccatcctttcgtgaataggtcagtaaggtctataatgtctgtaatgacatcttgaagctaagactcctcaataaggtgcgatgaggacatctcttcgctctcaatgtgtgtggttacagatgtggactagtgtagtataacaggcatctgtcgaggaatatgccacaatactattggtgactacacttgcaccaaatgcccttctaaaaggctgaggcaataagtcggagcacgtataaatcttctca

SEQ ID NO: 75 - protein, 56 aa, Oryza sativa
RLQEDSKLYVFLELMSQGSLASLYQKYRLRNSHVSRYTKQILNGLTYLHNRNIVHR

SEQ ID NO: 76 - DNA, 2331 bp, Oryza sativa
gctttctcatttcgcacaacagaataccagcaaagaatccaagattatccaggcatcgctcatgaaaccattcatccacagagcagctgctttgctatgtctcgccgtagcaactgcggtgtgtctctcctccgtcacagcgatgtcctgccagagaaaatgcggtgacatcgaagttccttttccattcggcatagacggtgatcagcctggctgtgccaagccgggctttgagctgagctgcggcaacaacacggagagtggtgtaccgattctcctccgcaaagtgcagccccttagcaggagcgtggaggtgctcggcatctccttgccgaaaggccagctccggatgaggatgcatatgtcctctcactgctacaacatgaccactcgtgtcatggactgcgtcgacaacgggtggatggacttgacggggagtcccttcaccttctccgacagcgcgaacaagttcacggcctttgggtgccaagttcttgcatatcttggggcgggcgaacagagggacataggaagcaacctaagaattggctgcgcggccagttgtggcaaggatgattctgccactatcggtggtggtagatgctctgggataggctgctgccagacggctatcccaaaggggataaagtattataaggcatggtttgatgaccgcttcaacacgtcttccatgtacacatggaaccgttgtgcctatgcagcgctcgtggaggagtccagcttcaatttctccatgatttacgattcatcatcgaagttcaacagcgataccgtctctagtcagccgccgtttgtggttgactgggttatgggaaatatatcatgcaaagaagctcgtaaaaatctaggtacctacccatgcatcagcaacaacagcatttgtttggactcacagaatggaccgggttacatttgcaactgcagaaaggggttccagggtaacccttacaataaaggtcttgacagctgccaagatattaatgagtgtgacgatcctaagaagtacccctgctatggtaaatgcattaacaaacttggaggatttgattgtttctgccctgcgggaatgagaggaaatgcatctgttggaccatgccggaaagatttcccactgggaattggtattgcaattggtttgggtgttggtttcggaattctcctacttagcttgtctgtggtgtttcttatccgtaaacagagaagcgacatccaaaggcaactacggaaaaaatattttcagaaaaacaaaggccttctactagaacaactaatatcttctgacgaaagagctagcgatagcacaaaaattttctccctagaagagcttaaagaggcaactaataactttgacccaacacgtgttctcggtagtggaggtcatggtatggtttacaaaggtatcttatctgatcaacgtgtggtggcgataaaaaaaccaaacatcatcagggaagaggagattagccagtttatcaatgaggttgtaattctctcacaaataaatcatcgccatattgtcaaactctttggatgctgtcttgaaactgaagtccctctattagtgtatgattttgtacctaatggttcactaaatcaaattattcatgctgataaaagtaacagacgtttctcattgtcctgggatgattgtttgcgaattgctacagaagcagcaggtgctttatattacctccactctgcagcatcggtatcagttctacatcgtgatgtgaaatcatctaatatactcttggattcaaactacaccgctaaagtttcagattttggagcttcaagattgattccgaatgaccaaacccatgttttcacaaatatacaagggacatttggatatttagatcctgagtactaccatactgggcatctcaatgagaaaagtgatgtgtatagttttggtgtagttcttttagagctgcttctaagaaggcaacctatttttgacgatggcactggcacaaagaaaaatctatcaatatattttctttctgagataaaaggaaagcctattacagagatagttgcccctgaagttattaaggaagcaatagaggatgagattaatatttttgcctcaattgcacaggcatgcttgaggctccgaggtgaagaaaggccaacaatgaagcaagtggagatatcattacagtctataagaaacaaagttttgagttcaggcagcgctagttccgaaagcaaccatgagatagaaacacccttatgtgaaagttacgttgatctgcatcaaactatgggtgttgatatcaatggcattgctaatttaatatcttc

SEQ ID NO: 77 - protein, 61 aa, Oryza sativa
MHLLDHAGKISHWELVLQLVWVLVSEFSYLACLWCFLSVNREATSKGNYGKNIFRKTKAFY

SEQ ID NO: 78 - DNA, 2301 bp, Oryza sativa
atggcgttccagttccacacgctactatcagccgtaacaatatggctgggcgtagcggctgctacggcgaggctccatgccgccgtcgccggagcacgagcgccgccgccgccgccgccgcccggcaactgccaaaggaagtgcggcgacgtagacatcccctacccgttcggcgtctggaacggcagcgagtccgacggctgcgccgttccaggcttctacctgaactgcgacgtcgacgacaaccacgtctacaggccgttccacgggaatgtggaggttctcagcatctccctgccgaccgggcaggcccgggtgacgaactccatctcctccgcttgctacaacaccagctcccgcgacatggactacaacgactggcagatcaacttcaccggcacgccgctgacgatctccgacgccgacaacaagttcaccgtcgtcgggtgccagacgctggcgtacatcaccgacgacgacaacatgggcaagtacacgagcgggtgcgtcgccatgtgccagggaggcgacctgacgagcctcgccaccaacgggtcgtgctccgggataggctgctgccagacagccatccccaggggtctgaagtactaccgcgtcaggttcgacacgggcttcaacacctcggagatctacaacgtcagccgctgcagctacgcggtgctgatggagtcgaaggccttcagcttccggacgagctacgtgagctcgctggaatttaacagcagcaacggtggcagggtgccgttggtggtggattgggctatcggaaacgagacttgtgataaagcccgcagaaaggttgacacctatgcatgtgtcagccacaacagcaagtgcttcaactcgtccaacggaccaggctacatctgcaactgctccgaagggtaccaaggtaacccctacctgcaggacgggcagcacggttgcacagatatagacgagtgtgcggatccgaagtacccttgttccgtgcctggaacttgccataatcttcctggcgggttcgagtgcttatgccctcgcagtcgtcccaaaggcaacgcattcaatgggacatgcgagagagatcaaacccttcatactggaggaaaagtagctattggaatttccggttttgctatcgttggcctcgttgtttttcttgtacgagaagtgatccagcacaaacgaagtatcaaaagacaagctctgcagagacagactgacatgtattttcaacaacacggaggacagatcttactagaactgatgaaagtagagagcagcgctgagttcaccctctacgacagagagaagatcgaggtagccacaaacaatttcgccaaggagaacattgttggcaaaggagggcaggggaccgtttacaaggctgtcctcgacggcaccactgttgcgataaagaggtgcaacgaggttgatgagagcagaagagccgacttcgtgcaggagctggtcatactctgtcgtgtcaaccacccaaatatcgtcaaactagtcggctgctgcctgcagttcgaggcccccatgctaatctatgagttcgtgcagaacaagacactgcaagagctactggacctccaaaggagtaggaagttccacgtcacactggcgacccgcttaaggattgctgcagaatccgccaatgcacttgcacatctccactcactgccgcgcccaatactccacggcgacgtgaagccagccaacatacttcttgctgaaggattggttgcaaaggtgtctgactttggttgctcaacgattgatgagaaaacccaagctgttgtaaaaggtacaccgggatatctcgacccagactatctacttgagtaccagctcacagccaagaatgatgtatacagctttggggtcattcttcttgagctcctaacgggtaagaagccactttcaaaagaacggacgagcttgatcccaatatttcaaggggcaatggaaagtggcaaactcgttgagctcctggacagtgacatagtagatgaagccaacatgggagttatctgtcaggcagcatcactagctagtcaatgcttggctaatccaagttcatcaaggccaacaatgaggcaagtggcggagcagcttcgacgactagcattggcagatgaagtacaacaatgcccacaaccgccgctagtgctcgatggcctcatcctcacagagatggggagcacaacatcatcatggtacacaggaagtggaacaagcggggtttataaccttgagaacaatgtcgttctaagcacagaattcgctagatga

SEQ ID NO: 79 - protein, 766 aa, Oryza sativa
MAFQFHTLLSAVTIWLGVAAATARLHAAVAGARAPPPPPPPGNCQRKCGDVDIPYPFGVWNGSESDGCAVPGFYLNCDVDDNHVYRPFHGNVEVLSISLPTGQARVTNSISSACYNTSSRDMDYNDWQINFTGTPLTISDADNKFTVVGCQTLAYITDDDNMGKYTSGCVAMCQGGDLTSLATNGSCSGIGCCQTAIPRGLKYYRVRFDTGFNTSEIYNVSRCSYAVLMESKAFSFRTSYVSSLEFNSSNGGRVPLVVDWAIGNETCDKARRKVDTYACVSHNSKCFNSSNGPGYICNCSEGYQGNPYLQDGQHGCTDIDECADPKYPCSVPGTCHNLPGGFECLCPRSRPKGNAFNGTCERDQTLHTGGKVAIGISGFAIVGLVVFLVREVIQHKRSIKRQALQRQTDMYFQQHGGQILLELMKVESSAEFTLYDREKIEVATNNFAKENIVGKGGQGTVYKAVLDGTTVAIKRCNEVDESRRADFVQELVILCRVNHPNIVKLVGCCLQFEAPMLIYEFVQNKTLQELLDLQRSRKFHVTLATRLRIAAESANALAHLHSLPRPILHGDVKPANILLAEGLVAKVSDFGCSTIDEKTQAVVKGTPGYLDPDYLLEYQLTAKNDVYSFGVILLELLTGKKPLSKERTSLIPIFQGAMESGKLVELLDSDIVDEANMGVICQAASLASQCLANPSSSRPTMRQVAEQLRRLALADEVQQCPQPPLVLDGLILTEMGSTTSSWYTGSGTSGVYNLENNVVLSTEFAR

SEQ ID NO: 80 - DNA, 1884 bp, Oryza sativa
atctttgctttcttgctccgcctacctggatggatggatcccccctccctattaatacagcacgcttcttcctcttcctcctcacgattcaagccaaacgcagccggccgacctcctcccgtgccttcctcctcgatccccggagagagaaaaaaggctccatcttttttcctctttccgtttttgggcgcgaacgcctcgtcccccccggatcgatcttgctcgcgcgcggtccgtagtcgcgtgctctgttcgaaaggcgagtccctctttttttttcttctccggccgcgggcgctaattttcttggagggcgacgcgccacctttggcccggccatgaacgcgctcgccgccaccagccgtaacttccggcaggccgccaggctgctcggcctcgactccaagctcgagaagagcctcctgatcccgttccgcgagatcaaggtggaatgcaccatccccaaagacgatggaaccttggcgtccttcattgggttccgcgtgcagcacgacaatgcccgcgggccaatgaaaggtggcattcgctatcaccctgaggttgatccagatgaagtaaatgcacttgctcaactaatgacatggaagactgctgttgcagcaattccatatggtggagcaaagggtgggattggatgcgctcctggtgaattaagcacgagtgagctggagcgtttgacacgtgtatttacacagaaaattcatgatcttattggagctcatactgacgtgccagctcctgacatgggaactaattcacagaccatggcttggattttggatgagtactcgaaattccatggtcattcaccggcagttgtcactgggaagccaatagatcttggtggatcattaggtagagatgctgctacaggaagaggtgtgatgtacgctactgaggctcttttggctgaacatggaaagtccatttctggatcaacctttgttatccagggttttggtaatgttggttcatgggctgcacgaatcatccatgagaagggtggcaaggtgattgcacttggagatgtgacaggctcaatcagaaacaagaatgggttagacatacctgctctgatgaagcacagaaatgagggtggtgctttgaaagattttcatgatgcggaagtcatggattcttcagagctactagtgcatgaatgcgatgttctcatcccatgcgctttaggtggagtgctcaacagggaaaatgcacctgatgtgaaggccaaatttataattgaagctgctaatcatccaactgatccagaagctgacgagattcttgccaagaagggagtgaccatattacctgacatttacgccaactccggtggtgtgatcgttagctattttgagtgggttcagaacattcaagggttcatgtgggatgaggagaaggtgaacatggagctccacaagtacatgaacaattctttccagcacatcaaggccatgtgtaaatctcatgattgcaacctgaggatgggggcgttcaccctgggagtcaaccgggttgcacgtgccaccctcttgaggggatgggaggcatgaggccattaacaacactcatatccatgtccgaaaatgttggacgaccaatgtctgatctgataaattcatcagaagtggccggcttggaaggagctcacttgcaataatattcaagatagatcggcgtcggcgtccttccaccgttccggcgaaaaataataataaatatattaagggtacctaacaaaaatgtgatgtttcttctttcgtttttacaaaaggccgattcaatcgtgcgtgattatagtattgacaaaaaatggtgtaagctctagaggcaatttgaatttcacaaaggttgtattctgtc

SEQ ID NO: 81 - protein, 411 aa, Oryza sativa
MNALAATSRNFRQAARLLGLDSKLEKSLLIPFREIKVECTIPKDDGTLASFIGFRVQHDNARGPMKGGIRYHPEVDPDEVNALAQLMTWKTAVAAIPYGGAKGGIGCAPGELSTSELERLTRVFTQKIHDLIGAHTDVPAPDMGTNSQTMAWILDEYSKFHGHSPAVVTGKPIDLGGSLGRDAATGRGVMYATEALLAEHGKSISGSTFVIQGFGNVGSWAARIIHEKGGKVIALGDVTGSIRNKNGLDIPALMKHRNEGGALKDFHDAEVMDSSELLVHECDVLIPCALGGVLNRENAPDVKAKFIIEAANHPTDPEADEILAKKGVTILPDIYANSGGVIVSYFEWVQNIQGFMWDEEKVNMELHKYMNNSFQHIKAMCKSHDCNLRMGAFTLGVNRVARATLLRGWEA

SEQ ID NO: 82 - DNA, 1361 bp, Oryza sativa
ctctcgctccccttctctcttagcttgctagctgatgtacttgccgcgatccagcgacctcgcgcttcgtctcccatggcaacgacgcagttgctgtccaccgtcgagcaccgggagacgctcccggagggctatgctcggcctgagtccgaccggccgcggctcgccgaagttgccacggacagcaacatcccgctcatcgacctcgcctcgccggacaagccgcgggtcatcgccgagattgctcaggcctgtcgcacctacggcttcttccaggtcaccaaccacgggatagcagaggagctactggagaaggtgatggccgtggcgttggagttcttcaggctgccgccggaggagaaggagaagctgtattccgatgagccatccaagaaaatcagactctctacgagctttaacgtccgcaaggagacagtacacaactggagagattatctccgccttcactgccacccgctggaggaattcgtacccgagtggccctctaatccggcacagttcaaggagattatgagcacgtactgccgagaagtccggcaactggggctccggcttctcggcgccatctctgtcagcctcggcctcgaggaggactacatcgagaaggtgctcggcgagcaggagcagcacatggctgtgaactactacccgcggtgtccggagccggacctgacctacggccttcccaagcacacggaccccaacgccctcaccatcctcctccccgatccccatgtcgccggcctccaggtcctcagggacggcgaccagtggatcgtcgtcaacccacgccccaacgctctcgtcgtcaacctaggcgaccagatacaggctctgagcaatgacgcgtacaagagcgtgtggcaccgtgcggtggttaacgcggtgcaagagcgcatgtcggtggcatctttcatgtgtccgtgcaacagcgcggtgatcagcccggcgaggaagctcgtcgcggacggggacgcgcccgtgtaccggagcttcacctacgacgagtactacaagaagttctggagcaggaacctggaccaggagcactgcctagagctcttcaaaggccagtagtaacgactaatgaactcgatcgtgtgcagaaacttcagacttgcgcttcactacccaagttaaaattgcttgccgctcgttgctgcagtgcagatatcctcgtcgtttgacggttgtgtgtggttgtctggtgcacttaatttatcggttcagtacttaattatgtcgggcaatgctttacttattttatcgatgttatgtatcacataatgctttggttattcctaaaacttccaataaaattggtatgcctaattaccctc

SEQ ID NO: 83 - protein, 340 aa, Oryza sativa
MATTQLLSTVEHRETLPEGYARPESDRPRLAEVATDSNIPLIDLASPDKPRVIAEIAQACRTYGFFQVTNHGIAEELLEKVMAVALEFFRLPPEEKEKLYSDEPSKKIRLSTSFNVRKETVHNWRDYLRLHCHPLEEFVPEWPSNPAQFKEIMSTYCREVRQLGLRLLGAISVSLGLEEDYIEKVLGEQEQHMAVNYYPRCPEPDLTYGLPKHTDPNALTILLPDPHVAGLQVLRDGDQWIVVNPRPNALVVNLGDQIQALSNDAYKSVWHRAVVNAVQERMSVASFMCPCNSAVISPARKLVADGDAPVYRSFTYDEYYKKFWSRNLDQEHCLELFKGQ

SEQ ID NO: 84 - DNA, 1369 bp, Oryza sativa
gactaaaacctcattaattgatcaaggcagcgagtagccccagctaaccattacacgggcattccatctccagccatccctagggctgtaattaacatggctccagccattgccaagcctctcctgagcgatctggtggcacaatccgggcaagtcccctcgagccacattcgtccggttggcgaccgcccggacctcgacaacgtcgaccacgagtccggcgccggcattccggtcatcgacctgaaacagctcgacggcccggatcgccgcaaggttgtcgaggccatcggttcggcgtgcgaaaccgacggttttttcatggtgaagaatcacgggatcccggaggaggtggtggaagggatgctgcgcgtggcgagggagttcttccacatgccggagtcggagcggctcaagtgctattccgacgaccccaagaaggcgatccggctgtcgacgagcttcaacgtgcgcaccgagaaggtgagcaactggcgcgacttcctgcgcttgcattgctaccctctcgagagcttcatcgaccagtggccctccaacccaccctccttcaggcaagtggtcggcacctactcgagggaggcgagggcgctggcgctgcggttgctggaggcgatatctgagagcctcgggctggagaggggccacatggtgtcggccatggggcggcaggcgcagcacatggcggtgaactactatccgccatgcccacagccggagctcacctacggcctgccggggcacaaggaccccaatgccatcacgctgctgctccaggacggcgtctccggcctgcaggtccagcgcaacggccgctgggtggccgtcaaccccgtgcccgacgccctggtcatcaacatcggagatcaaatccaggcgctgagcaacgaccggtataagagcgtgctccaccgggtgatcgtgaacagcgagagcgagaggatctccgtgccgacgttctactgcccgtccccggacgcggtgatcgcgccggccggcgcgctggtggacggcgccctgcacccgctggcgtaccggcccttcaagtaccaggcctactacgacgaattctggaacatgggcctccagtccgccagctgcttagaccggttccggcctaacgatcaggccgtctgattatggtccataaacttttcttgaaaaaggaaaagattgtgatccataaacaggccatgcaaaatatccttacatccgatgcgacgtgttataccactaaaaaaggtgctcctctaccctagctttctcgaaaaaaataaaacaaagtggagcactaccaatctagatctatgtgacgctaaacaatagacatgtgagtgaaatatgttttggc

SEQ ID NO: 85 - protein, 352 aa, Oryza sativa
MAPAIAKPLLSDLVAQSGQVPSSHIRPVGDRPDLDNVDHESGAGIPVIDLKQLDGPDRRKVVEAIGSACETDGFFMVKNHGIPEEVVEGMLRVAREFFHMPESERLKCYSDDPKKAIRLSTSFNVRTEKVSNWRDFLRLHCYPLESFIDQWPSNPPSFRQVVGTYSREARALALRLLEAISESLGLERGHMVSAMGRQAQHMAVNYYPPCPQPELTYGLPGHKDPNAITLLLQDGVSGLQVQRNGRWVAVNPVPDALVINIGDQIQALSNDRYKSVLHRVIVNSESERISVPTFYCPSPDAVIAPAGALVDGALHPLAYRPFKYQAYYDEFWNMGLQSASCLDRFRPNDQAV

SEQ ID NO: 86 - DNA, 1108 bp, Oryza sativa
aactctgccatttcgtcgattgtcctcctcttcccttgacggtgcaaagcagcatctccatcgcaatggattaccaccgaatccacccggtgggcgtcggctcgccggcgccggcgccggacagccagcagcaggtcggcaaggggaggtcgacggcgagctacggtgagaaggagcagctgccgatcaccgcgccacggccgtacgcgccggcaccgctgccgccgccgccgccgcggcgcaggagccgcgggcggcggtgctgccggtgcgtgtgctggacgctgctcgccgtactcgtcctcgccgtggcgctgggcgccacggcgggcatcctgtacgcggtgttcaagcccaagataccggacttccacgtggaccggctcaccgtgacgcggttcgacgtgaacgcgacggcggcgacggtgagcgacgcgttcgaggtggaggtgacgtcgacgaacccgaaccggcggatcgggatctactacgacggcggcgaggtgacggcgtcgttcaacggcacggagctgtgccgcggcgggttcccggcgctgtaccagggccaccggagcacggtgcgccccgtcatcctgctcgccggcgagacgcggctggacagcgccgtggcgctgcagctggcgcggcagcagcaggccgggttcgtgccgctcacggtgtgggcgcgcgtgccgatccgcatcaagttcggcaccatcaagctgtggaagatgaccgggaaggcgacctgcaacctcgtcgtcgacaacctcgtcgccggcaggcagatccgcatccgctccaacagctgcagcttcaagctcaaggtctgatcgagctttgtagaggcgttgatccatctccatttctgtgaatccatccgttgagttgagattagcaggtggtagaggcgcgtatttttacatttttaccaatactagtttctgtgaatccatccgtttttggaagctctgctactcagattaggtttaatgtatgagcaccgatgtatatatgaaaatgcatacgcgatgaatttctttgaaaatggcaataaagatggcgaatttgttcgtctggcatgccccaactgaagcaatttcagtat

SEQ ID NO: 87 - protein, 255 aa, Oryza sativa
MDYHRIHPVGVGSPAPAPDSQQQVGKGRSTASYGEKEQLPITAPRPYAPAPLPPPPPRRRSRGRRCCRCVCWTLLAVLVLAVALGATAGILYAVFKPKIPDFHVDRLTVTRFDVNATAATVSDAFEVEVTSTNPNRRIGIYYDGGEVTASFNGTELCRGGFPALYQGHRSTVRPVILLAGETRLDSAVALQLARQQQAGFVPLTVWARVPIRIKFGTIKLWKMTGKATCNLVVDNLVAGRQIRIRSNSCSFKLKV

SEQ ID NO: 88 - DNA, 528 bp, Oryza sativa
atggctcttgaggggaaaccaggtttcattaccatgtacgccatcacatgctgcaaatgcgagaaatggcgtacgattccaacaaaagaagagttcgaggtaatccgtgagaactaccccgcgaagccatggttctgcagcaaaaagcgcgactgctcatgtgagcaccctgaagatatccagtatgacaccagccgtatttgggccattgataggcccaacatccctaagcctccgccgaagacagagaggctactgatcatgaggaatgatctatctaaaatggatgcctattatgtcttgccaaatgggaagcgtgcaaagggcaaacctgatatagataggtttctgaaggaaaacccagagtatgctgctactttaccactttcgagcttcaacttctcaacacctaagatagttaaggagactgtttccgatagtgcaaagtgggtgatggcgaagtctgagagggaagagcagtgtatgcaactagacgcaaaagaagttccaagttccagcagcaagtat

SEQ ID NO: 89 - protein, 175 aa, Oryza sativa
MALEGKPGFITMYAITCCKCEKWRTIPTKEEFEVIRENYPAKPWFCSKKRDCSCEHPEDIQYDTSRIWAIDRPNIPKPPPKTERLLIMRNDLSKMDAYYVLPNGKRAKGKPDIDRFLKENPEYAATLPLSSFNFSTPKIVKETVSDSAKWVMAKSEREEQCMQLDAKEVPSSSSK

SEQ ID NO: 90 - DNA, 3084 bp, Oryza sativa
ggcaggcagaggataccggcgcggcggcgcggcgggccggcggcggcgggggaaggatctcggccggcaaaccgcgcggccgttctactcctccgggaatatggagccgaagcgcccaggaaaaagactcaggcagtcagactgaacaatgagcttatgagaatgctagaaatcgacgaactcaagacagtttttgggatccatcacaaagtgttcatccctatcctggatacatttgattcgaagcatctaaacacggtgaactgttatgcaacgccacgagcagctgaactggggaactgaatttggctgctggctttagatctccccgtcccagaaatcctccagcgacttgtaaaagctcgtcggatgggtcaagaattcgtacttgaaaagcctaacctgcatgttgcaaacagaacgtacagctcaggaaaaatctttagagtatcaggctttcagcaagtaatttgtcaaaatatggagccatgcctgttgaatctcgtagaactttgccatcagttcttcagggatgcaccagtcaaatatgtcaatgttctcccttgtccacacctcattgtcgctctttgggagcacgctctgtcccatctgaataccccagcgaagagcaacctgagcaggacttttctgcagcttcttggcaatggaaatcacagtaggatggctcagaacgtttggtccatcgttccctggtgatccgggtgaacctaatggtgcatatgcctgcaagaatagcatgaaaacaaatcagagtgaagtaaatgattaatatgctgagttgctgaccaaagttggaaagaaatggaaagtaaacagtgagaggatcataggaacgtcttaatacagttcgaacttacagaaagatgaacgcccttggattggcagagcttccggagcttgccttgctgccaaaccggatggcactccacctggttgaccgctggaggcacgcgagcaacattgagcaagtcctccagcttcttgcatgaaaaattgctcacgccaatggcacgagctttgcctgaatcatacaacttctccattgcttgccatgtagctgggatatcaggcttgagtcaatatgacgatatccaacctgcaccagtacaagaagataacatttacatccaaacagagaaaaatccagtcgatcgacatgattgttatacgcaggtgggtgcagcatgagtaacaacgaaatagaagataataagactatcgcctatattgattgttaatcatcaagaagaaatgaaaagacctggacagcagcgcggatggaatcttgaacagcacctggtgaaatttgccaggtgccaagaccgactgatgggatcgccgcgttggtgtttaggacaaaggattcagccatattcactccaaagatcaaactgtccttggtttccaagcttcctcttcttgtgtcgatggaatccaacagagagcgaacttgagcttacctggtgtctgagcaagaagatctgagcactaatggtaggtagccaaggtatgcagcggttgaaatgagcccggtgatcaccagtagtatactctaaaataagagcttccagaatccatttaataatacataattgaccactctagatgagacttagagaaacctgcaactgacgaagctaatgcaatttgaaatagagaaatcgcatcttggcaattgatctgccaaagagaaggtaataggcaagcatcacagctcaagtaatttattttaagggtgagtcaagtcaatttatatttcagaaagactttcgaaacaagtttaactagaaatattagctgctgaagtcatacaacaaaatcaagatgctgactaactacttactggcagcatttaaaaatcattgtacacttgagagaaaacatcttatgtcactgaaattttacttgtcccaaatatgctactcatatcgcaaactcatgcccatttatgccatcagagatgcagcggccaagttatctattatctagtaaacacttatgccatcaggtgacaattctaacactgccaatgcttcttccccaatgaactcgccttcacttgttcaatggcagtggcgggcaggttgtgctgctggtgcggggtccgtgagctgctggacactgcccggtgatgtcctgtccccggcaggtgaggggcctggctagctggtaccgcagaagatggtgagaggctgagacctcagatcagagtggcgaactggagtgctgacctgatgccatcgcctggcggggactcgttgagcaatggcagtttccagtttttcacccacacgaagaaagcaaacttcagtccagccaagtcgatcattagatttcgccatcccaaagctcttcgattgatttgtagacgccttccggagagcttgatgaacaggtcctccgggatggaccagtcatagacgtcaatgttctccttgatcctctcctcgtgggtgctcttcgggagcacgctgtgccccatctgaatcccccaccgtagagccacctgcgccggcgtcttccccagcttctccgccgtggagacgaccaccgggtgcgcgagcacattgcccaccgctttcaccgacgctgtccccggcgagcccaacggcgagtacgcctgcagtgacgcatgacaaagaagaagatttgaagcacatcactaggataatgcactgaaggagaagttcagagttgggtgatatcctgttcagaatagcttcagctgttcagcatcagaacttgcggagcttggtctgctgccacaccgggtggcactccacctggtcgacggccggcggcacgcgtgcgacggcgagcaggtcctccagcttcttgctcgagaagttgctgacgccgatggcgcgagccttgccggagtcgtggagcttctccatcgccgcccacgtcgccgggatatcggtcgggaggacgttttgcccgccaaagccggcgcccttcttcatcctcactggccagtggatctgacgaacagcgtgagcatcctcaactcggatacttttaagataatgaaagctttatttaaactcagttaattacatc

SEQ ID NO: 91 - protein, 115 aa, Oryza sativa
MGQEFVLEKPNLHVANRTYSSGKIFRVSGFQQVICQNMEPCLLNLVELCHQFFRDAPVKYVNVLPCPHLIVALWEHALSHLNTPAKSNLSRTFLQLLGNGNHSRMAQNVWSIVPW

SEQ ID NO: 92 - DNA, 720 bp, Oryza sativa
atggcatcagagtatactactggtgatcaccgggctcatttcaaccgctgcataccttggctacctaccattagtgctcagatcttcttgctcagacaccaggttggatatcgtcatattgactgttctccacagtatggtaatcagaaagaggtccacggtccagttcgtgccaagaaaggtactaaattgagtgtggaaaattacctcaagcctgatatcccagctacatggcaagcaatggagaagttgtatgattcaggcaaagctcgtgccattggcgtgagcaatttttcatgcaagaagctggaggacttgctcaatgttgctcgcgtgcctccagcggtcaaccaggtggagtgccatccggtttggcagcaaggcaagctccggaagctctgccaatccaagggcgttcatctttctgcatatgcaccattaggttcacccggatcaccagggaacgatggaccaaacgttctgagccatcctactgtgatttccattgccaagaagctgcagaaaagtcctgctcaggttgctcttcgctggggtattcagatgggacagagcgtgctcccaaagagcgacaatgaggtgtggacaagggagaacattgacatatttgactggtgcatccctgaagaactgatggcaaagttctacgagattcaacaggcatggctccatattttgacaaattacttgctgaaagcctga

SEQ ID NO: 93 - protein, 239 aa, Oryza sativa
MASEYTTGDHRAHFNRCIPWLPTISAQIFLLRHQVGYRHIDCSPQYGNQKEVHGPVRAKKGTKLSVENYLKPDIPATWQAMEKLYDSGKARAIGVSNFSCKKLEDLLNVARVPPAVNQVECHPVWQQGKLRKLCQSKGVHLSAYAPLGSPGSPGNDGPNVLSHPTVISIAKKLQKSPAQVALRWGIQMGQSVLPKSDNEVWTRENIDIFDWCIPEELMAKFYEIQQAWLHILTNYLLKA

SEQ ID NO: 94 - DNA, 1019 bp, Oryza sativa
atccatcactccatcatctatctgctcacacattcactgctgctcatcgcgtgcagagcggttaactgaaatttgatttggatcatagttagggattgaattaggatggcaacgacggtgactcgtgcacacctggaccagaggcttgccctcgccaagcgctgctccaggggtacgtacgttaattacgtgtgttttacaaaagaaaactagctagtactactgtaataacattcatgttctttttgcgtcaaatcttcttgcattccatggcgctaataactgaatatatacaaactgatgtatgcttcgtcgatctgcagaggcgaaccttgcaggggttaaggcggctgctgtcgcgaccatcgcctctgccgttccaaccgtcagtagtctctcttctttctcaaatgcttcttctttcttgtgtcaattaattctttatcagaagagtaggttttctaacttagctgcatatgcttgtgtgtgctgtttatttcagctggcgagcgtgaggatggtgccatgggcgaaggccaacatcaacccgacgggacaggcgctgatcatctgcacggcggccgggatggcatacttcgtcgccgccgacaagaagatcctctcgctggccaggaggcactccttcgagaacgcacctgaacacctcaagaacacctccttccagggcaccggccgcccccaccctgccttcttcaggccctgatcaataattacaagaacacaacatatgctatattatatatacttctagctacctggctagctagctgcatatgatcagagtagtatctgtatcatgtagtagtagtagtagtagtaatacaatacaagtactacgcccctgcagagatcgaaccgtttacaacagctagctgctcatcctggcctcttgccattaggcattatctagccacacctgaatatgaatacatgcatgtactcctatcttgtactaataacttcatgtaacactgctgcagtaataatgttcagaaatc

SEQ ID NO: 95 - protein, 139 aa, Oryza sativa
MLRRSAEANLAGVKAAAVATIASAVPTVSSLSSFSNASSFLCQLILYQKSRFSNLAAYACVCCLFQLASVRMVPWAKANINPTGQALIICTAAGMAYFVAADKKILSLARRHSFENAPEHLKNTSFQGTGRPHPAFFRP

SEQ ID NO: 96 - DNA, 2148 bp, Oryza sativa
atgtgggcgttctacctgctgtcgctgccgctgacggtggggatggtggtggcgacgctgcgctacttcgcgggccccgccgtgccgctccacgtcctcgccaccgtcggctacgcctggctctgctccctctccttcatcgtcctcgtccccgccgacatctccacgacaattactggcagtcaggagggtgacgttggattcttttggagctggacgtattggagcacatttttcctatcatggtctattgtacctacactccaggggtatgaagatgctggggacttcacagttaaagaaaggctgaagactagtatccacaagaacttggtctattataaaatcatagggtccattggtctcgttggagtaattctgattataaccatgcgtcatgattgggctggtggtatcatggggtttgctatggcgtgttcaaatacctttggattagtgacgggtgcctttcttcttggttttggtctgagcgaaattccaaagaatatatggaaaactgctgattggacccgtcgccaaaaattcctctatcacagaatcgcaaatatggctggcaaatttgataatgctcaccaagaatattgccacgcaatagctgttgttcaagccacctcgaaacaaatgaccaagcgtgagcctctaaggccttttatggatatcattgatgatatgcttgctcaaatgctgagagatgatccactgttcaagccttctggtggaaaattaggagaagatgatatggactatgatactgatgaaaatacaatggcctcacttcgacgtcaacttaggagagccaatgaggagtattataggtgtaaaagcaaatatacaagttacgttatggaggcccttgaactagaagacaccattaaaaactacgagcaacgtgatgcaaatgaatggaaatatgtatcaggtttaagggaaagtagatcttgcacactgggatccttccttgacttcatagagttcatttggcgttgtatactgaaaaagcaactcctgaaggttcttgctgtaatcctcggttgcatctcagctgccatactattggctgaggccactttactgcccagtgatgttgatttatcgcttttctctgttcttacaaatgttgtaggaaagcaagaagttctagtccaggttgttgcatttattcctttgatgtacatgtgtatttgcacatactattcgctcttcaggatagggatgatggtggtatattcactgacaccgaggcaaactagttcagttagcttgcttatgatttgttcaatggttgcaagatatgcagctcctatttcttacaacttcctgaatctcattcaccttggtggtaattctaaaactacatttgagaagaggatggggaacattgatgatgtcgttcccttctttggaagaagcttcaacagaatatatccactcattatggttgtttatacactattggtcgctggtaatttctttgggtatgtgcttgaattttttggaagctggaaaaggttcagattctggactgaacaagaagaagatcatacagatgggttcgatccatctggagtgcttattctgcagaaagagagatgttggattgaacaaggacataaagtcggtgagctggttgctccattagcaagaaatttcactggtatatacaaagacgttgaatctggaaatgtgcaacaggatgaagaaactgcagggatgaaagcaacaacacttccatccaaaaaggaaggaagactccagtcgaaatatgctagtaacgttgctcttaaatattcttctataagagaacaaaacagcagccatcaagcagttaagcaagcccagacagaaacccaatcgacctctgttgtgcctgaaactggaaactcagagacaccctcttctgtcagtaaagaaccagattcatcagctggaatcgcatcgagatggaccttaatgaagacgggatttcagaacttcaaagcaaacatgagttccaagaagtttcttcctttgagcctgtcatcaacacaatcgtctagttcagggtcgcttgatgagatcttcgagggacttaaacggcattcaagcaatgcaagtgtggattacctcgacgatgatgacggcatttag

SEQ ID NO: 97 - protein, 715 aa, Oryza sativa
MWAFYLLSLPLTVGMVVATLRYFAGPAVPLHVLATVGYAWLCSLSFIVLVPADISTTITGSQEGDVGFFWSWTYWSTFFLSWSIVPTLQGYEDAGDFTVKERLKTSIHKNLVYYKIIGSIGLVGVILIITMRHDWAGGIMGFAMACSNTFGLVTGAFLLGFGLSEIPKNIWKTADWTRRQKFLYHRIANMAGKFDNAHQEYCHAIAVVQATSKQMTKREPLRPFMDIIDDMLAQMLRDDPLFKPSGGKLGEDDMDYDTDENTMASLRRQLRRANEEYYRCKSKYTSYVMEALELEDTIKNYEQRDANEWKYVSGLRESRSCTLGSFLDFIEFIWRCILKKQLLKVLAVILGCISAAILLAEATLLPSDVDLSLFSVLTNVVGKQEVLVQVVAFIPLMYMCICTYYSLFRIGMMVVYSLTPRQTSSVSLLMICSMVARYAAPISYNFLNLIHLGGNSKTTFEKRMGNIDDVVPFFGRSFNRIYPLIMVVYTLLVAGNFFGYVLEFFGSWKRFRFWTEQEEDHTDGFDPSGVLILQKERCWIEQGHKVGELVAPLARNFTGIYKDVESGNVQQDEETAGMKATTLPSKKEGRLQSKYASNVALKYSSIREQNSSHQAVKQAQTETQSTSVVPETGNSETPSSVSKEPDSSAGIASRWTLMKTGFQNFKANMSSKKFLPLSLSSTQSSSSGSLDEIFEGLKRHSSNASVDYLDDDDGI

SEQ ID NO: 98 - DNA, 1379 bp, Oryza sativa
gatccacactgccaacatctgcaagcagcagccagcagcagcagcagctcaccatcacttgggagttcggagctggtcagcattatcaagcttgagctgagctaggtacgtaggcgggcttgatctcgtggttgacacacgagctcatcgtcagccatggcgtttagctctagggccgtcgtcgccgtcgcttcggttgctctgctcgtcgcggctctggcctccaccgccgcagccgagggcaatcccgtcgagtacacggagagttactacgataacacgtgccccaacgcgcagaacatcgtgcgatcggtgatggagcggagcgtcgccgccaacccgaggatggcgccggccatcctccgcctcttcttccacgactgcttcgtcaatggttgtgatggctccctcctcctggacagtacggattccacggagagcgagaaggaggaaaaagccaacgcctccctcgccggcttcgacgtgatcgacgccatcaagtccgagctcgagcgcagctgcccggccaccgtctcctgcgccgacgtcctcgcgctcgcctcccgcgacgccgtcgccatgctcggcgggcccagctggggcgtgctgctcggccgcaaggactcgcgcttcgttaccaagaacgccacggaggagctcccggacccgagaaacggccacctcgacgtcctcctcggggtgttccgcgagcacggcctcgacgaacgcgacctcaccgcgctctccggcgcgcacaccgtcggcaaggcccacagctgcgacaacttcgagggccgcatcgacggcggcgagggctacgacgacatcgacccgtcctacgcggcggagctccgtcggacgtgccagcggccggacaactgcgaggaggccggcgtgccgttcgacgagcggacgccgatgaagttcgacatgctctactaccaggacctgctcttcaagcgggggctcctcgccaccgaccaggcgctctacaccccgggcagctgggccggcgagcttgtgctgacctactcccgcaaccaggaggcgttcttcgccgacttcgcgagggcgatggtgaagatggggaacatacgcccggacccttggactccgacggaggtcaggatcaagtgctccgtggccaatggtcattattgatggccggccgtcatatctccttttgtttaagctttgagtccacccaactctttttggactcatctgtatttgtctaaatcaaaattttacgtttactgtattcgtttgtatatgtcaatttttgtttcttctaacgatgcattcgtatatgaattcgtatatgtgcaatatgatgtgatgcgaaattaaaaatgtgtattggcacgttttgaatgacc

SEQ ID NO: 99 - protein, 334 aa, Oryza sativa
MAFSSRAVVAVASVALLVAALASTAAAEGNPVEYTESYYDNTCPNAQNIVRSVMERSVAANPRMAPAILRLFFHDCFVNGCDGSLLLDSTDSTESEKEEKANASLAGFDVIDAIKSELERSCPATVSCADVLALASRDAVAMLGGPSWGVLLGRKDSRFVTKNATEELPDPRNGHLDVLLGVFREHGLDERDLTALSGAHTVGKAHSCDNFEGRIDGGEGYDDIDPSYAAELRRTCQRPDNCEEAGVPFDERTPMKFDMLYYQDLLFKRGLLATDQALYTPGSWAGELVLTYSRNQEAFFADFARAMVKMGNIRPDPWTPTEVRIKCSVANGHY

SEQ ID NO: 100 - DNA, 842 bp, Oryza sativa
atcatacatacatacaaatcaattccctttttaattagcaattagagagcttaattaattttgcatcgaaaatggcaacctccagcttgctagtagctgcagtgctcgcggcggcggccatggcggcgacggcgcagaactcggcgcaggactacgtggacgcgcacaacgcggcgaggtccgacgtcggggtggggccggtgagctgggacgacacggtggcggcgtacgcggagagctacgcggcgcagcggcagggcgactgcgcgctggagcactcggactccggcgggaagtacggcgagaacatcttctggggctccgccggcggggactggacggcggcgagcgcggtgtcgtcgtgggtggcggagaagcagtggtacgaccacgacagcaacagctgctcggcgccggcggggagctcgtgcgggcactacacgcaggtggtgtggagcaactcgacggcgatcggctgcgcccgcgtcgtctgcgacaacagcctcggcgtcttcatcacctgcaactactcgccgccgggcaacgtcgacggcgaatctccctactagctactagtaagtatacgtacggctactttatatactactatcgtacgctgatccggccagcgctgcaggaggactacgtacgtacgtgtacgtagtaagtagtccttgtttttactgtattttacaatatttttacacacacagttcgcatgcttaattatacgtggatgtacgtataagcatgtgtgcgtgtatatatatatatatatatatatatgagtgtttgtacttgtgccggtgggaataaagccgtcagccgtacgtgcgtgatat

SEQ ID NO: 101 - protein, 165 aa, Oryza sativa
MATSSLLVAAVLAAAAMAATAQNSAQDYVDAHNAARSDVGVGPVSWDDTVAAYAESYAAQRQGDCALEHSDSGGKYGENIFWGSAGGDWTAASAVSSWVAEKQWYDHDSNSCSAPAGSSCGHYTQVVWSNSTAIGCARVVCDNSLGVFITCNYSPPGNVDGESPY

SEQ ID NO: 102 - DNA, 2022 bp, Oryza sativa
atgaaatacacctttcttctcttcctttgccttgtatcctttgtcacttctagtgagcaccagtttgtcttctccggcttcaccggcagcaacctcgtccttgatggtgccgccaccatcaccgaagatgggctccttgagctcaccaatggcgcgaataatatcgaaggccatgcgttctacccaactccgttgcgctttcgcaagtcgccaaacgacatggtacaatctttctcggtttcatttgcgttcagcatcctccaaaaatatgccaatcggagcaacgatggcatggccttcttcatagcaccaagcaagaacttctctgatgcatcattgcctgcacaatatttgggcctcctcaacaaccaaaacaatggcaatagaagcaacgatttgttcgccgtcgagctcgacaccttccaaaacaaggagttccaagacatggatgacaaccatgtagggatcaatgtcaacagcatgaagtccttggatgcacactatgctggtttctatgaagacaggagtggcatcttcaggaaccttactcttgtcatccatgaggcaatgcaagtttggtttgattatgatggtgatgccaagaagattagtgtcaccttggctcctgccagattggccaagcccaagagacctctactgtctgtcacctacgacctctcaacggtggttgcagattcagcctacatcggtttctcagctgcaactggaggtgtagtcaacacaaaacactgtgttcttggatggagctttaggatgaatggccctgctcaagctattgatatctccaggttgcccaagctgccaaatcttggcagcaagaagtcccattcttctaggatcttggtaatcatatcaccggtggcaaccgctgtattgattttccttgttggtgttctccttgttctctgtgtacggaggcgactcaagtacacagagattcaagaagattgggaggttgagtttggtccgcatcgtttctcatacaaggttctgtatgatgccactgaaggatttaaggataagaacttacttggtgtcggaggatttgggaaggtgtataagggagtgcttccggtgtctaaacgagtggttgccgtgaagtgtgtttcgcatgagtcgagccaaggtatgaaggagtttgttgctgagattgtcagtatcggtcaacttcgacaccgaaaccttgtgcagttgctcggttattgtaggaggaaaggtgaactccttctggtctatgactatatgtcaaacggtagccttgacaactatttgtattgtgatttgaccgagccaacattggattgggcacagagatttaacattgtcaaaggtgtcacgtcaggactactctacctccatgagaaatgggggaagattgtaatccaccgagatatcaaggcaagcaacgtgcttcttgataaagatatgaatgcacgattaggtgactttggcctctcaagattatatgaccacggaaccgacccacaaactacgcacctggtaggcacaatggggtacctagccccagagctagtgttcacaggcaaggcatctcctgccacagacatatttgcctttggcgtattccttctcgaagtcacttgtggacaaaggccactcaacaacaatcaacaagataatcaacccccaatgctggttgattgggtccttgagcactggcagaaaggattactgcctgagacagtagacaaaagattgcagggcaactacaatgttgatgaggcatgtctagtgctgaagctaggtctattgtgttctcacccaatcgccatggaaaggcctaccatgagtcaagtccagagatacctcgacggcgacgcgccgctgccagagttggcaccgtcggagctgaagttcaacatggtggctctcatgcagggccaaggcttcgactcgtatgtcttgccatgtctgtctttgtcgtcggtggtgagcattgaaacctcacccgaggtagacgatgacactgctagtgtttga

SEQ ID NO: 103 - protein, 674 aa, Oryza sativa
MKYTFLLFLCLVSFVTSSEHQFVFSGFTGSNLVLDGAATITEDGLLELTNGANNIEGHAFYPTPLRFRKSPNDMVQSFSVSFAFSILQKYANRSNDGMAFFIAPSKNFSDASLPAQYLGLLNNQNNGNRSNDLFAVELDTFQNKEFQDMDDNHVGINVNSMKSLDAHYAGFYEDRSGIFRNLTLVIHEAMQVWFDYDGDAKKISVTLAPARLAKPKRPLLSVTYDLSTVVADSAYIGFSAATGGVVNTKHCVLGWSFRMNGPAQAIDISRLPKLPNLGSKKSHSSRILVIISPVATAVLIFLVGVLLVLCVRRRLKYTEIQEDWEVEFGPHRFSYKVLYDATEGFKDKNLLGVGGFGKVYKGVLPVSKRVVAVKCVSHESSQGMKEFVAEIVSIGQLRHRNLVQLLGYCRRKGELLLVYDYMSNGSLDNYLYCDLTEPTLDWAQRFNIVKGVTSGLLYLHEKWGKIVIHRDIKASNVLLDKDMNARLGDFGLSRLYDHGTDPQTTHLVGTMGYLAPELVFTGKASPATDIFAFGVFLLEVTCGQRPLNNNQQDNQPPMLVDWVLEHWQKGLLPETVDKRLQGNYNVDEACLVLKLGLLCSHPIAMERPTMSQVQRYLDGDAPLPELAPSELKFNMVALMQGQGFDSYVLPCLSLSSVVSIETSPEVDDDTASVZ

SEQ ID NO: 104 - DNA, 2144 bp, Oryza sativa
cccacctcacctcacctcctcctccacctcctcgaaattattcgaatccatctccttctccctcctcccaacccgcgccaaatcgatcgatcgcgagcgatcttggccgcgtctcaccaatggcgtcctccgcgccttccgcccccggcctcgcgccggtcgccaagccgccgccgccgccgtccaaggtgaaggtggcgacagcaaccgtgccaaccaatggcaagatcaagcagggtgcgaggccaatgcgtgtctcggcgccgccggtggagccgcggcggcggatgaacccgctccagcggctggcggcggcggcgattgacgccgtggaggaaggcctcgtcgccgggttgctcgagcgggggcacgcgctgccgcgcaccgctgatccggccgtgcagatcgccgggaactacgcgcccgtcggggagcgcccgccggtgagggggctgccggtgtccggccgcctcccggcgtgcctcgacggggtgtacgtccgcaacggcgccaacccgctccacgcgccgcgcgccgggcaccacctgttcgacggcgacgggatgctgcacgccgtgcggctcgccggggggcgcgccgagtcgtacgcgtgccggttcacggagacggcgcggctgcggcaggagcgggagatgggacgccccgtgttccccaaggccatcggcgagctccacggccactccggcgtcgcgcggcttctgctgttcggctcgcgcgcgctctgcggcgtgctcgacgcgtcccggggcatcggcgtcgccaacgccggcctcgtctaccacgacggccgcctcctcgccatgtccgaggacgacctcccctaccacgtccgtgtcacccacgacggcgacctcgagaccgtcgggaggtacgacttccatgggcagctcgacgccgacggcaccatgatcgcgcaccccaagctcgacccggtcaccggcgagctcttcgcgctcagctacaatgtcgtgtccaagccgtacctcaagtacttctacttcaccgccgacggccgcaagtcccgagacgtcgacatccccgtcggcgcgccgacgatgatccacgacttcgccgtcaccgagaactatgccgtcgtccccgaccagcagatcgtgttcaagctccaggagatggtgcgcggcggctcgccggtggtatacgacagggagaaggcgtcgcggttcggcgtgctcccgaagcgcgccgccgacgcgtcggagctccggtgggtggaggtccccggctgcttctgcttccacctctggaacgcgtgggaggacgacgccaccggcgagatcgtggtcatcggctcctgcatgacgccgccggacgccgtgttcaacgagccgtcgcagtcgccggaggaggagagcttccgcagcgtgctctccgagatccgcctcgacccgcgcaccggcgtgtcgcggcggcgcgacgtgctgcgcgacgccgccgagcaggtgaacctcgaggccggcatggtgaaccggcagctgctcggccggaagacgcggtacgcctacctcgccatcgccgagccatggccgagggtgtcgggcttcgccaaggtggacctcgagagcggcacggcggagaagttcatctacggcgaggggaggtacggcggcgagccatgcttcgttccgcgcgccggcgccgcggcggaggacgacggccacgtgctgtgcttcgtccacgacgaggagcgcggcacgtcggagctggtggtggtggacgccggcagcgaggcgatggaggaggtcgcggccgtgaagctgccggggcgcgtgccgtacggattgcacggcaccttcattggcgccaacgagctgcagcgacaagcttagctcaaattaattagccagtgaaaaatcaaattacagagttgcttaatttttttactagtagaacgcaacagtaaaaagaattaacagcagtgaattattagttaattagctagggagttgaaatagtttagcggtcatgcactactgatttttaattagtgcagacaacgaccgcgtgtgtgtatatgcatgtataccttttactgtatcttcagattgtgtatatatatcatatatgtacaggaaaagatttatatatcatacatattttgttgt

SEQ ID NO: 105 - protein, 582 aa, Oryza sativa
MASSAPSAPGLAPVAKPPPPPSKVKVATATVPTNGKIKQGARPMRVSAPPVEPRRRMNPLQRLAAAAIDAVEEGLVAGLLERGHALPRTADPAVQIAGNYAPVGERPPVRGLPVSGRLPACLDGVYVRNGANPLHAPRAGHHLFDGDGMLHAVRLAGGRAESYACRFTETARLRQEREMGRPVFPKAIGELHGHSGVARLLLFGSRALCGVLDASRGIGVANAGLVYHDGRLLAMSEDDLPYHVRVTHDGDLETVGRYDFHGQLDADGTMIAHPKLDPVTGELFALSYNVVSKPYLKYFYFTADGRKSRDVDIPVGAPTMIHDFAVTENYAVVPDQQIVFKLQEMVRGGSPVVYDREKASRFGVLPKRAADASELRWVEVPGCFCFHLWNAWEDDATGEIVVIGSCMTPPDAVFNEPSQSPEEESFRSVLSEIRLDPRTGVSRRRDVLRDAAEQVNLEAGMVNRQLLGRKTRYAYLAIAEPWPRVSGFAKVDLESGTAEKFIYGEGRYGGEPCFVPRAGAAAEDDGHVLCFVHDEERGTSELVVVDAGSEAMEEVAAVKLPGRVPYGLHGTFIGANELQRQA

SEQ ID NO: 106 - DNA, 2870 bp, Oryza sativa
gactcctcttcctcctcctcctcctcctcctgcgatcccggcgcagcatcgatcgccattgccactcgagctccgagctcctcggaaaagcagtgaacccaccactaagctcgcgacatctcgcaacacagcttgcttgctgcgtcgcggtatatagagcagtagctagcttagcttgtcgatctccaatggcgctccaggcatcgtcgtcgccgtccatgttccgcgcgatcccgacgaacaccaacgcttcttgccggcgaaagttgcaggtcagggcgagcgcggcggcggcggcggcgaacggcggcggggatgggaaggtgatgatgaggaaggaggcggcgtcgggcgcgtggaagatcgactactccggcgagaagccggcgacgcctctgcttgacacggtgaactacccggtccacatgaagaacctctcgacgccggagctggagcagctggcggcggagctccgggcggagatcgtgcacacggtgtccaagaccgggggccacctgagctccagcctgggcgtcgtcgagctcgccgtggcgctgcaccacgtgttcgacacgccggaggacaagatcatctgggacgtcgggcaccaggcgtacccgcacaagatcctgacggggcggcgttcgcggatgcacaccatccggcagacctccgggctcgccgggttcccgaagcgcgacgagagcgcgcacgacgcgttcggcgcgggccacagctcgacgagcatctcggcggcgctcgggatggcggtggcgagggacctcctcgggaagaagaaccacgtcatctcggtgatcggcgacggcgccatgaccgccggccaggcgtacgaggcgatgaacaactcgggctacctcgactccaacatgatcgtggtgctcaacgacaacaagcaggtgtccctcccgacggcgacgctcgacggccccgccacgcccgtcggcgcgctgagcaaggcgctgacgaagctccagtcgagcaccaagctccgccgcctccgcgaggcggcgaagacggtgacgaagcagatcggcgggcaggcgcacgaggtggcggcgaaggtggacgagtacgcgcgcggcatggtgagcgcgtcgggctcgacgctgttcgaggagctcgggctctactacatcggccccgtcgacggccacagcgtcgacgacctcgtcgccatcttcaacaaggtgaagtcgatgccggcgccggggccggtgctcgtccacatcgtgacggagaaggggaagggctacccgccggcggaggccgccgccgaccggatgcacggcgtggtcaagttcgacccgacgacggggaggcagttcaagtccaagtgttcgacgttgtcctacacccagtacttcgccgaggcgctgatccgggaggccgaggccgacgacaaggtggtcggcatccacgccgccatgggcggcggcacggggctcaactacttccacaagaggttcccggagcggtgcttcgacgtggggatcgcggagcagcacgccgtgacgttcgccgcggggctcgccgccgaggggctcaagccgttctgcgccatctactcgtcgttcctgcagcgagggtacgaccaggtggtgcacgacgtcgacctgcagcggctgccggtgaggttcgccatggacagggcggggctcgtcggcgccgacgggcccacgcactgcggcgcgttcgacgtcgcctacatggcgtgcctgccgaacatggtcgtcatggcgcccgccgacgaggccgagctcatgcacatggtcgccaccgccgcagccatcgacgaccgccctagctgcttccgcttcccccgcggcaatggcattggcgccgtcctcccccccaaccacaagggcacacctctcgaggtcgggaaggggagggtgctcgtaggagggaacagggtggcgctactagggtacggcacgatggtgcaggcatgcatgaaggcggcagaggcgctgaaggagcacggcatctacgtcaccgtcgccgacgcgcgtttctgcaagccgctcgacacagggcttatccgggagctcgctgccgagcacgaggtcctcgtcactgtggaggagggctccatcggagggttcggttctcacgtcgcccactacctcagcctcagcggcctcctcgatggccccctcaagttgaggtccatgttcttgccagacaggtacatagaccatggtgcaccagtagaccagcttgaggaggcaggattgacaccaaggcacattgctgccactgtgctgtccttgcttgggaggccattggaggcacttcagctcagctgaataattcagcatgactgtatgcatatacacatcagccgacaaataaacaggaaactgatgatagctaatttatgagagatatggagatcttctccttctccattatccttggcctaattaaccatggccacatggatatggagggggggaggttccagtaagaagtagggttactaggaagaagatgaaggagaaggcaacaaaaagcccatgtgtatgtgtttcttggcctgttgcaaaacatgcttccaaatgcaaaatgataatggaggtgtttgtgtacaagaggatggagacatgaagatggggcatgcatgtccttgcatgatagtattgacatgagaaggagaaggatatgcctctcatctggcattgtcaggagtgacatatatgaatgcatggctccttatgttcttttgttactttgtatagataacaagtataagaaagaatcatgtattctagtagtactacatacatacaaactcagttccctatgcagaaggaaaatggagaataagatggaaagtttttcttgtt

SEQ ID NO: 107 - protein, 713 aa, Oryza sativa
MALQASSSPSMFRAIPTNTNASCRRKLQVRASAAAAAANGGGDGKVMMRKEAASGAWKIDYSGEKPATPLLDTVNYPVHMKNLSTPELEQLAAELRAEIVHTVSKTGGHLSSSLGVVELAVALHHVFDTPEDKIIWDVGHQAYPHKILTGRRSRMHTIRQTSGLAGFPKRDESAHDAFGAGHSSTSISAALGMAVARDLLGKKNHVISVIGDGAMTAGQAYEAMNNSGYLDSNMIVVLNDNKQVSLPTATLDGPATPVGALSKALTKLQSSTKLRRLREAAKTVTKQIGGQAHEVAAKVDEYARGMVSASGSTLFEELGLYYIGPVDGHSVDDLVAIFNKVKSMPAPGPVLVHIVTEKGKGYPPAEAAADRMHGVVKFDPTTGRQFKSKCSTLSYTQYFAEALIREAEADDKVVGIHAAMGGGTGLNYFHKRFPERCFDVGIAEQHAVTFAAGLAAEGLKPFCAIYSSFLQRGYDQVVHDVDLQRLPVRFAMDRAGLVGADGPTHCGAFDVAYMACLPNMVVMAPADEAELMHMVATAAAIDDRPSCFRFPRGNGIGAVLPPNHKGTPLEVGKGRVLVGGNRVALLGYGTMVQACMKAAEALKEHGIYVTVADARFCKPLDTGLIRELAAEHEVLVTVEEGSIGGFGSHVAHYLSLSGLLDGPLKLRSMFLPDRYIDHGAPVDQLEEAGLTPRHIAATVLSLLGRPLEALQLS

SEQ ID NO: 108 - DNA, 4143 bp, Oryza sativa
gactgcaaactcgcatatgtgcacatatcaatatatcatactagtaccattctgccggcatcaagttcgggcttcgagtgcccagctaccgcgagctgatttttatgaagaaaactctcaactctgtacagcgctgaaaggaagctagttttcagataatcttagcctaattaagctaaaccattcttcaggtatttcaactactaccaactgagtgtccgaacattttatacaacattgaaaatttaaactttccgatccgtttcaatgtatgaacacaaccaagatcgatcgaaattcgagcaaacaagctcgccatgaccatgaaggttaccactgcaactgcacatttcctcttggtgttcttggcgtccaccatctcccattcagtcatctgctcagctctcggaaacgaaaccgatcagctgtcttcgctgcttgaattcaagaacgcgatcagtctcgatccagagcaatccctcatctcatggaacagcagcaaccacctgtgcagctgggagggcgtctcgtgcagctccaagaacccaccacgcgtcaccgccattgatctagtaggtctagtaggtcgcatctctccttcgctcgggaacctaacattcctcaggaacctctccctggcgacgaacagattcaccggccagattccggcgtccctcggccgcctccgccgcctccggtcactctacctcagcaataacagctgcaagggaccataccgagcttcgcgaactgctccgagctcagggcgctgttcctcgacggcaatgagctcgccggaggactccccggcgccggcgacctgcccgtcggcatcgaggcgctggtgctctcgtcgaaccgtctcgccgggacgatccctccctcgctcggcaacgtcacgacgctgaggaagcttgcctgcatgaacaacggcgtcggcggcggcatccccggcgagctcgccgcgctgcgcgggatggaggtgctggccgtcgacggaaaccggctgtcgggtgggtttccggtggcagtcatgaacatgtcggggctcgccgtgctcggcctcagcaccaacggcttcaccggcgagctgccgtccggcatcggcggcttcctgcccaagctccggcagctcaccatcggcggcaacttcttccaagggaatatcccttcttccttagcaaatgcttcgaatcttttcaagcttggtatgtctgacaataacttcaccggtgtggtgcctgcctccattggcaagcttgccaagcttacattattgaaccttgagatgaatcagctccatgctcgtagcaagcaagaatgggagttcatggataacctagctaattgcaccgagctacaagtactctctcttgagaagaatcaaatggaaggacaggtaccaagttcactaggcaatttttcagttcaacttcagtatctttacctggggctcaatagattgtcagggagttttccttctggcattgcaaaccttccaaacctgataattctggcactggatgacaactggtttacaggttctgtaccacaatggcttggaggtctcaaaacattgcagagcctaacagtgtcctacaacaattttacagggtatgtcccctcctccctttccaatctatcacatttgatggagctttttctagagtcaaatcagttcattgggaacatacctccaagccttggaaaccttcagttccttacaacaatcgacatttccaataacaatcttcatggtagtgtgccagagtaaatcttcagaattccaacaatagagcaagtttggttaagattcaataatctcagtggggaacttcctgcagaagtagggaatgccaagcagctcatgtatttgcagctttcatccaatatgttgtctggagatcttcctaatactttgggcagctgcgaaaatttgcaacatattgagctggatcataataatttaagtggaggtattcccccttcgtttggcaaattaattagcctaaagtttctcaacctatcacacaacaagttaactggatcaataccaatgttacttggtgatcttcagcttcttgaacagatagatttgtcattcaaccatcttagaggtgaggtcccaactaaaggtatcttcaagaattcaagtgccatacaaattgatggaaatctagggctttgtggaggtgcactagagttacacctacctgaatgtcctattacgccatcaaatacgactaaacgcaagccatctgtactagccatagtgattccattagctagtatggtgacacttgcattggtgatattggtcttgtttatctgtaagggaaaacaaaagaaaaactcaatgtctttgccctcatttggtagtgaatttcccaaagtttcttatagggatcttgccagagcaacaaatgggttttcaacatccaatttgattggcgaaggaagatacagttctgtataccaaggacagtcatttcagggcataaccgtagttgctatcaaggttttcagtctagagacaaggggagcacaaaaaagcttcattgcatagtgtaatgctttaagaaatgtgcggcatcgtaatctagttcctatcttaacggcgtgctcaagcattgattcaagtgggaatgacttcaaagcattggtatataaattcatgccacggggagatttgcataaattactgtactcaactccacatgatgatagatcttcaaatttgtgctctatttcactagctcaaaggttaaacattgtggttgatgtatctgatgcattggcatatctacaccacaaccatcaagggccaattattcattgtgatctcaagcctagcaacattcttttggatgatagtatgacagctcatgttggagactttggacttgcaaggttcaaaattgattctaaaacatctttgggtaactcagtttcaacttcttcattcacaataaatggaaccataggatatgttgctccaggtatatatgatccatttcacacagtattttcttaacaattaattgaagacaacagtttcataatttgtttatatgacatctaaaatgaactctcttcctgcatacgatatgtagaatgtgccataggtggtcaagtttcaactgctgcagatgtatacagcttcggagttgttctcttagagatattcataaggaagaggccaacagatgacatgtttaaggatggattgagcattgcaaaatatgcagatatcaacatccctgacaggttgctgcagattgttgatcctcagctggtacaagagttgagcctcaaccaagaagatcgagttgctaccgatgaaaatgcagcacactgccttctttctgtactgaacattggactttgctgcaccaagtcatcccccaatgagcgcatcagtatgcaggaggtggctgccaagctgcacgcaattagggattccatatctcagaggttactgaatcaacatcaacactgttagttgttctgttttgtctgaaactccgaataattttcagaagacatgctgtacgccaagcaccacctctagactgagccggcgccaattcagttatatcgatggcgaccaccacaacacgtagggatctgtgctcttggacatggagcagagggtcctcatggaggagatcgtcacactgctccccgtcgagagggccgtcgccacgacgaggttcgtgctcggacttctccgcaccgacatgatcctgcacactggcgtggcgtgccgagacgcgttggagatgagagccagcaaacagctcaaggaggcaacgcatgaggacctcctgatccccaacactggcaactttgtggagacgctctatgacgtggactgcatggagcggatgctggggcagttcatcgtcacagttcacgaactcgtcggtgtacgttcaccggtccgtctcgccacagatataggacgaaggctaggtggttgacgcatcctccggcgagctcatgccacggattagaacagtggccaagctcgtcgacagctactccctcattccctaaatattttacgccgttgactttttaaacatgtttgatcgttcgtcttattcaaaaatttaagtaattattaattcttttcctacc

SEQ ID NO: 109 - protein, 283 aa, Oryza sativa
MNNGVGGGIPGELAALRGMEVLAVDGNRLSGGFPVAVMNMSGLAVLGLSTNGFTGELPSGIGGFLPKLRQLTIGGNFFQGNIPSSLANASNLFKLGMSDNNFTGVVPASIGKLAKLTLLNLEMNQLHARSKQEWEFMDNLANCTELQVLSLEKNQMEGQVPSSLGNFSVQLQYLYLGLNRLSGSFPSGIANLPNLIILALDDNWFTGSVPQWLGGLKTLQSLTVSYNNFTGYVPSSLSNLSHLMELFLESNQFIGNIPPSLGNLQFLTTIDISNNNLHGSVPE

SEQ ID NO: 110 - DNA, 2565 bp, Oryza sativa
atgtccaccttgttagcccaccttgttcggcgggaaggattcggtgaactggcagttcaccttgttcaacagctgcttgagctcttcaggctcggccgcatggggagggaggccctcaattgccagccgaacgatgtgtctcattttggtgcttcgggcatgaatggcacggaatctagatcaaaattacttgactggatatttaccgacattcattgggaatatgacttacctgagggaactaccgtggactcagcgccattaactttggcgctaagctataacgtttcagcgccaacgatgttggcgctaagctctaatccaaggtatattgatagctgtggtttaagcggggacctaccattaaccctttccaagcttaagaacctgagagcattacgagcatcagataatgatttcactgggaaaataccggattatattggaaacttgtcaaatttggaagtactgaagctccaaggaaacaaaattgaaggccccattcctgcaagtctttcaaagcttgtcaagttgaatagtagtttaaccctgcgaaactgcaacatatctgacaagctgacttcagtggacttctcaaattttaagaacctcacggacttgaatttggtgtggaacaactttatgatagatagctctaacagcagtattttgccttcagggctagaatgtctccagcaagatactccatgtttccttggtcaaccagagtattcctcttttgcggtagattgcggtggttccagatccgttaaaagcgacgataagttcatttatgaatctgacggtgccaatctacaaggtgcatcatactacgttacaaggccagtgagatggggtgttagcaatactgggaaattctacatgggtgaacctaatagaagttacattatatacacttcaaatcagtttaacaaaacacttgatagtgaactattccagacagctagaacgtcaccctcttctctgagatactatggcattgggctcaagaatgagatcttcccagatggacagatctggcaaagcatgggaaggaggattttcgatatatacattcagggagagcgcaaagaacaggactttgatataaagaaatatgcaaatgaaaaatcaaatactcctgttgaaaggcaatactttactgacgttacaaacaatttcatggagattcatctcttctgggctggaaaaggcacttgttgcattcctaccctagggttctatgggccatctatctcagcattaagtgtctctttttcgggggatcctggtctaaacataaacaacacgactaacggtgagaatacaagcagcggtagaagaggtttggttgttggagttgtagtcagtgctgttattgtaggacttctagcagttacaggaacttttgtttggacacagaaacgtaaaaggttagaggtcgagatggaagagctcctcagcatagtgggaacgcctaatgtatttagttatggagaaataaaatcagctactgacaactttagtactcaaaacattctcggaagaggagggtacggacttgtttacaagggtaagctacttgatgggagaatggtagccgtgaagcagttatctgcaacatctcatcaagggaaaagggagttcatgacagaaattgcaacaatatctgcagttcaacatcgaaaccttgtgaagttgcatggttgttgcattgagagtgatgccccacttttggtctatgaatatatggaaaacgggagccttgatcgagcaatcctaggcaaggcaagcttgaaactagactggagaacccgctttgagatatgcgtaggcatagcaagaggcctagcatatcttcacgaggagtctagcacacgaatagtgcacagggacatcaaaaccagcaatgtcttacttgatgctaacctcaatcccaagatctctgactttgggcttgctaggcattataatgacagcatgactcatgttagcacaggagttgcaggcacgctaggttatctcgcacctgagtatgccatgatgggccatctcacggagaaagctgatgtttttgcatttggaatcgtggcaatggaaatcattgcaggaaggccaaactttgatgatagcgtcgaggatgataagaaatacctacttggatgggcatggtgtttgcatgagaacaagcagccacttgaaatattagacccaaaactcacagaattcaaccaggaagaggtcatgcgagtcatcaacgtcattcttctttgcacaatgggcttgcctcatcaacgcccaccgatgtcgaaagtcgtgtccattcttacagaagatatcgagacggttgaagtggaagcaaatgcgaggcctagctatatccctcagtcgcagatcaggagtgagaatgatggcttcatagcaggctacttctcaggatcatcgatacagcaatcttcaggtacccaaggcagcatgccatcaagctcaagcagcaaacccaaatttcacagggacacctcccctttagcactgtcgccttgttctagctgtgagattgattag

SEQ ID NO: 111 - protein, 854 aa, Oryza sativa
MSTLLAHLVRREGFGELAVHLVQQLLELFRLGRMGREALNCQPNDVSHFGASGMNGTESRSKLLDWIFTDIHWEYDLPEGTTVDSAPLTLALSYNVSAPTMLALSSNPRYIDSCGLSGDLPLTLSKLKNLRALRASDNDFTGKIPDYIGNLSNLEVLKLQGNKIEGPIPASLSKLVKLNSSLTLRNCNISDKLTSVDFSNFKNLTDLNLVWNNFMIDSSNSSILPSGLECLQQDTPCFLGQPEYSSFAVDCGGSRSVKSDDKFIYESDGANLQGASYYVTRPVRWGVSNTGKFYMGEPNRSYIIYTSNQFNKTLDSELFQTARTSPSSLRYYGIGLKNEIFPDGQIWQSMGRRIFDIYIQGERKEQDFDIKKYANEKSNTPVERQYFTDVTNNFMEIHLFWAGKGTCCIPTLGFYGPSISALSVSFSGDPGLNINNTTNGENTSSGRRGLVVGVVVSAVIVGLLAVTGTFVWTQKRKRLEVEMEELLSIVGTPNVFSYGEIKSATDNFSTQNILGRGGYGLVYKGKLLDGRMVAVKQLSATSHQGKREFMTEIATISAVQHRNLVKLHGCCIESDAPLLVYEYMENGSLDRAILGKASLKLDWRTRFEICVGIARGLAYLHEESSTRIVHRDIKTSNVLLDANLNPKISDFGLARHYNDSMTHVSTGVAGTLGYLAPEYAMMGHLTEKADVFAFGIVAMEIIAGRPNFDDSVEDDKKYLLGWAWCLHENKQPLEILDPKLTEFNQEEVMRVINVILLCTMGLPHQRPPMSKVVSILTEDIETVEVEANARPSYIPQSQIRSENDGFIAGYFSGSSIQQSSGTQGSMPSSSSSKPKFHRDTSPLALSPCSSCEID

SEQ ID NO: 112 - DNA, 3365 bp, Oryza sativa
ggcatcgtacaaacacaccatctatatatttaacaagcttccgtgttgtttcggcagcagaaagagagagagggatgggtggtgttagtggtaagctggtgtgggtgttgctcgtgatgtgctcctcatggctgatcgccgctgttcatgcccagcaagcggcaacaactgatccaatcgaagtggcggcgctggaggcgatcctggggagatggggcaagacgacgtcgccgctgtggaggatgagcggcgagccatgccgcggcgtccccgtcgacggcagcaccgacctcgacggcaaccccaagaacaaccccggcatcaagtgcgactgttcctacaacagcggcaccgtctgccatattacccagctgagggtatacgcattgaacgttgtcggtcagatacctgcagaattgcagaacctcacctacctaacttacttgaacctggatcaaaattacttgtcaggccccataccatcattcattgggcaattgactgccttgacagaattgcacgtgggattcaatccactctcaggatcacttccaaaggaacttggaaatctcacgaacctcaatttgctaggcattagtttgaccaatttttctggtcaacttcctgaagaattgggcaacttgaccaaacttcgacaattgtatactgatagtgctgggttgagtggcccattcccttctacgctctcaaggcttaagaacctaaaactcctgcgggcatcagataacaattttactggaacaatacctgattttattgggagcttgtctaatttggaagatctggctttccaaggtaattcttttgaaggaccgatcccagcaagtttgtctaatctaaccaaattgacaaccttgcggattggtgatattgtaaatgggagctcttcattggcctttatcagcagtctgacatctctggataccctcgtactgaggaactgcaagatatctggagaccttggagcagtagatttttcgaagttcgcaaacttaactttcctggacttgagttttaacaatatctcagggaatgttcctaaatcaattctgaatctacaaaagcttatattcctgtttcttggcaacaacagcctaacaggagaattgccagatgggataagcccttcgctaacgaacttagatttctcatacaaccagctcactggtagctttccctcctgggttacccagaacaatctgcaattgaatttggtggcaaacaactttattcttggcagcaccaacattggcatgctacctccagggctaaactgcctccaggaagatactccatgttttcgtggttctccaaaatattattcctttgcggtagactgtggtagtaatagatctatcagagtttcggataatactatgtacgaattggattccacaaaccttggggactcatcatattatgttacaagtcaaacaagatggggcgttagtaatgtaggaaaattattccaggccccaaatgacagtaagataatacatagtggtgagaagatccagaatgcagtggattcagaactattccaaactgcaaggatgtcgccgtcgtctctgagatactatggccttggacttgagaatggaaattacaccgttctgcttaaatttgcagagttaggttttccagacacgccaacttggcaaagcttaggaaggagattttttgacatatatatccagggtgaactaaaagaaaaggacttcaatataagaaagatggctggtggaaaatctttcactgctgtttacaagagttacacaacaactgtgtcaaaaaactttcttgaaatccatctattctgggctggaaagggcacttgttgtattcctattcaaggttactacggaccattgatctcagcattaagcatcactccaaattttagtcctactgtgcgaaacggtgtacccaaaaagaaaagtaaagcaggtgcaattgttgggattgtgattgctgcctcggttttaggatcagctatcttattcggaatatttatggtcataaagaagagaagaagaatggcaaaacagcaagaagaattatacaacctagttggacagcctgatgtcttcagtaatgctgaactcaagttagctacagacaatttcagttctcaaaacattcttggggaaggtggatatggtccagtctataagggtgtgctacctgatggaagagttatagctgtaaaacaactttcccaatcatcccatcagggcaaaagtcagtttgtgacagaggttgcaactatttctgctgtgcaacatcggaatcttgtaaaattgcatggttgctgcattgatagtaacacacctttattagtttatgagtatcttaagaatggaagcttggataaagcattatttggaaacggtagcataaaactggactgggcaacacgcttcgagatcattttaggaattgcaagaggcctaacttatcttcatgaggagtcgagcgtgcgcattgttcatagggacatcaaagctagcaatgtcctacttgacacagacctcaccccaaagatctctgactttggactcgccaagctttatgatgagaagaagactcatgttagtacaggaattgcgggcacatttggttatctggctcctgagtatgcgatgagacgacatttgactgaaaaggttgatgttttcgcattcggggtggtagcactagagattgttgctggtcggtcgaacaccgacaattctcttgaggaaagtaagatctatctctttgagtgggcttggagcttgtatgaaaaggagcaagcactcgggattgttgacccaagacttgaggaattcagcagggatgaagtgtatagagtcatccatgtcgcactcatctgcacacagggctcaccctatcagcgaccaccaatgtcaaaggttgtggcaatgctaactggagatgttgaggtggcagaggtagtgacgaagccgaactacatcaccgagtggcagttcaggggtgggaataccagctatgttaccagccactcaggatcaactacccctaagctaagcaggcagaaagagattgatcctctcactcaatcaccaacaatcaccggagttagccatgagcatgagggaaggtgaatgcaaagttgaatagatgcaggtgatcttggtttgaagtgacaatactatatgctattcgtgcttatgtgactatatgtaaatgtgaatcagagcaaatagcggaacttatttattctgaagtctgaactatgtgtcatgatgataaaagtattgctccttgtaatttgtaatggtgaaatatagtgctatatactaggatgtttggagttgatc

SEQ ID NO: 113 - protein, 1024 aa, Oryza sativa
MGGVSGKLVWVLLVMCSSWLIAAVHAQQAATTDPIEVAALEAILGRWGKTTSPLWRMSGEPCRGVPVDGSTDLDGNPKNNPGIKCDCSYNSGTVCHITQLRVYALNVVGQIPAELQNLTYLTYLNLDQNYLSGPIPSFIGQLTALTELHVGFNPLSGSLPKELGNLTNLNLLGISLTNFSGQLPEELGNLTKLRQLYTDSAGLSGPFPSTLSRLKNLKLLRASDNNFTGTIPDFIGSLSNLEDLAFQGNSFEGPIPASLSNLTKLTTLRIGDIVNGSSSLAFISSLTSLDTLVLRNCKISGDLGAVDFSKFANLTFLDLSFNNISGNVPKSILNLQKLIFLFLGNNSLTGELPDGISPSLTNLDFSYNQLTGSFPSWVTQNNLQLNLVANNFILGSTNIGMLPPGLNCLQEDTPCFRGSPKYYSFAVDCGSNRSIRVSDNTMYELDSTNLGDSSYYVTSQTRWGVSNVGKLFQAPNDSKIIHSGEKIQNAVDSELFQTARMSPSSLRYYGLGLENGNYTVLLKFAELGFPDTPTWQSLGRRFFDIYIQGELKEKDFNIRKMAGGKSFTAVYKSYTTTVSKNFLEIHLFWAGKGTCCIPIQGYYGPLISALSITPNFSPTVRNGVPKKKSKAGAIVGIVIAASVLGSAILFGIFMVIKKRRRMAKQQEELYNLVGQPDVFSNAELKLATDNFSSQNILGEGGYGPVYKGVLPDGRVIAVKQLSQSSHQGKSQFVTEVATISAVQHRNLVKLHGCCIDSNTPLLVYEYLKNGSLDKALFGNGSIKLDWATRFEIILGIARGLTYLHEESSVRIVHRDIKASNVLLDTDLTPKISDFGLAKLYDEKKTHVSTGIAGTFGYLAPEYAMRRHLTEKVDVFAFGVVALEIVAGRSNTDNSLEESKIYLFEWAWSLYEKEQALGIVDPRLEEFSRDEVYRVIHVALICTQGSPYQRPPMSKVVAMLTGDVEVAEVVTKPNYITEWQFRGGNTSYVTSHSGSTTPKLSRQKEIDPLTQSPTITGVSHEHEGR

SEQ ID NO: 114 - DNA, 1343 bp, Oryza sativa
gaagtgtttgtacttggctttgctggcctgtttctgttttgattactcgagctccagagcacagcagcagagagacgcgagctgttcgtggtcgtcgtcgtcgtcgatggacgcggcgtggcgcggcggcgttggctgctcgccggtctgcctcgacctctgcgtcgggctgtcgccggtgcgggagccgtcggcggcgaggcacgagctgcttgaccggccggccggctgccgcggcggtggggattccaagtcgatgaccaatgacgaggcgaagatcgtcgaggcgaaggtcactcagatgagcgaggagaatcggcggctgaccgaggtgatcgcccgcctgtacggcggccaaatcccgcggctcggcctcgacggctcggcctcgccgccgcggccggtgtcgccgttatcgggcaagaagaggagcagggagagcatggagacggcgaattcctgcgacgccaacagcaacaggcatcagggcggcgacgccgaccacgccgagagcttcgccgccgacgatggcacctgccggaggatcaaggtcagccgggtgtgcaggcggatcgacccgtcggacacctccctggtggtcaaggacgggtaccaatggcggaagtacgggcagaaggtgacgcgcgacaacccgtcgccgagggcctacttccggtgcgccttcgcgccatcgtgcccggtgaagaagaaggtgcagcggagcgcggaggacagctcgctgctggtggcgacgtacgagggcgagcacaaccacccgcacccgtctccgcgcgccggcgagctcccggcggcggcggggggggccggtggctcgctgccgtgctccatctccatcaactcctccggcccgaccatcacgctcgacctcaccaagaacgggggagccgtgcaggtggtcgaggcggcgcatccgccgccgccgccggacctcaaggaggtgtgccgggaggtcgcgtcgccggagttccggaccgcgctggtggagcagatggccagcgcgctcactagcgaccccaagttcaccggcgcgctcgccgcggcgatcctccagaagctgcccgaattctagcttcctttacaattctccaattcttcttacaggaaaaaacatagaggcgcatttcaatagagattagagcttaatctccccccaaatttgaaaattttatacagggtaagaattccgaatgcttttctgctgcttttaggatgtgaattgtactctctcataataacctgttggtccttgggccgtcggaagaagattgcgggcttctatcgggcctcacgatcctgagcccaattgcgaggctccttgagcc

SEQ ID NO: 115 - protein, 327 aa, Oryza sativa
MDAAWRGGVGCSPVCLDLCVGLSPVREPSAARHELLDRPAGCRGGGDSKSMTNDEAKIVEAKVTQMSEENRRLTEVIARLYGGQIPRLGLDGSASPPRPVSPLSGKKRSRESMETANSCDANSNRHQGGDADHAESFAADDGTCRRIKVSRVCRRIDPSDTSLVVKDGYQWRKYGQKVTRDNPSPRAYFRCAFAPSCPVKKKVQRSAEDSSLLVATYEGEHNHPHPSPRAGELPAAAGGAGGSLPCSISINSSGPTITLDLTKNGGAVQVVEAAHPPPPPDLKEVCREVASPEFRTALVEQMASALTSDPKFTGALAAAILQKLPEF

SEQ ID NO: 116 - DNA, 1192 bp, Oryza sativa
gaaagttcacgttttggtccccctcctgttcggcgacgggcgacgtacggcgccactataagaaacgtgccctattgctgtcacgccgtacttcctcccgcccaccgggcagctagcttagctgccgccatggacgacgacggcgacggctcatcgtcaccgaccgacgacagcgccgccgccgggcttttgccgctcttcagccgatcgccggccgaggatcttgaggagaagctgaggcgggcgatggaggagaacgcgcggctgacgcgagcgctcgacgccattctggccggtcaccacgcccaccagcgcgcgctcttggcgccgtcgctgtcgccgccgccgccttccgccacagcaagggcgccgagcgtgtccaccagctgcgcggcgagggaggacgccgcaccggcggtcgccgccgccgccgcgtcgacggcatgtccgtcgagacagcagccgccgaccgcggagccacggcccaaggtcaggacggtccgcgtgcgcgccgacgccgccgacgccaccgacgccaacagcatggcggagaccgtgaaggatgggtaccaatggaggaagtacgggcagaaggtgacgcgtgacaacccctaccctagagcttacttccgctgcgcattcgcgccgtcttgccccgtcaagaagaagctccaaagatgtgcggaggataggtcaatgctagtggcgacctacgagggagaacacaaccatgccctgtccacgcagacaaccgaattcgtcgccagcggctgcactacgagccagcacgccggggggtcgtcgtcgtcgccgctgccgtgctccatctccatcaactcgtcgggccgcacgatcacactcgacctgacgaaccaagcagggtccggatcgatcgcgagctgcggcgtcgaggcggccgccgtctccggcgagctcgtcacggtgctctcgccggagttgaggaggcacctcgtggaggaggtggtgcaagtgctcaagaacgacgccgagttcgtggaggccgtgaccaacgccgtggccgctagagttgtggatcaaatcccacacattcctgttcatttgtagttgtttttttttttctctttgagaacgttgatttgtagtttgtaggcagtatatatatcccaaaatgcttgcaagtatatgtacacatgtattcgcaaatgtgagt

SEQ ID NO: 117 - protein, 318 aa, Oryza sativa
MDDDGDGSSSPTDDSAAAGLLPLFSRSPAEDLEEKLRRAMEENARLTRALDAILAGHHAHQRALLAPSLSPPPPSATARAPSVSTSCAAREDAAPAVAAAAASTACPSRQQPPTAEPRPKVRTVRVRADAADATDANSMAETVKDGYQWRKYGQKVTRDNPYPRAYFRCAFAPSCPVKKKLQRCAEDRSMLVATYEGEHNHALSTQTTEFVASGCTTSQHAGGSSSSPLPCSISINSSGRTITLDLTNQAGSGSIASCGVEAAAVSGELVTVLSPELRRHLVEEVVQVLKNDAEFVEAVTNAVAARVVDQIPHIPVHL

SEQ ID NO: 118 - DNA, 2643 bp, Oryza sativa
gaggcgcaccgccctgacactcgagcaccgcgacgcgagcgcctgggctaccggcggcggcggcggcggcgagtcggcgacgacgtcttctaccgcggggggtcacacgaaggccggccaggccaacctccgcccgcaacgcaacgccctagctgcctgccacacggtctcggcctctctcgggcggccgcacgcacgccacgccacgcccactcgcctcgcttctcggccgcgtcgcgcgccgccgcgtggcgtagcctcccccctctccaaccttgttgttcctcgctcctcctcagtgcggcttcctgcgtgctccaggccccgtgacaagcgcggggggaggcggcccacatggatctcgaggcggggtcaatccgaccccgcagcgacggcgaaggcggcggtccggcggccggcagggagaccgatgatagcaatgtttggaaggatctattccttgcttacaagactcttggtgttgtttttggtggcctcgtcacttctcccctctacgtttatccctctatgaacttgtcatctcccacagaagctgactacctggggatatacagcataatgttttggactcttactttaattggtgtggtcaagtatgtatgcatagctctcaatgctgatgatcatggtgaaggtggtacatttgccatgtattctttgttgtgtaggcatgctgatataggcatccttccttccaaaagggtgtatgcagaagaagatccactgcttcacagtcagtctgcaatagccagaaggcctagtaggctgggaaagttctttgaacagagcataactgcaagaagagttttgttattcgtagcagtacttgggatgtgcatgctcattggagatggcatacttactcctgctatttcagtactatcagcaattgatgggataagagggccatttcctactgttagcaaacctgttgtggaggccctttctgcagcaattctcattggcttattcttattgcaaaagtatgggacttcaaaagtgagctttctgttttctccaatcatggcagcatggactttcaccactccaattatcggcttatacagtattgtacattactatcctggcatcttcaaagccatttcaccgtattatattgttcatttcttcctgagaaataaaaggcaaggttggcaactgcttggtgggactgttttatgcatcacaggtgctgaagctatgttcgcagatcttgggcacttcagcaaaaaggctattcagatagcatttctgtctagcatatatccttctttggtgctcacttatgctgggcaaacagcataccttataaacaatgtcaatgactttggtgatggtttctataaatttgttcctcgtcccgtttactggccaatgtttgtcgttgcaacactagcagcaattgttgcgagccaatccttaatatccgcgacattctctgtcatcaagcaatcagttgtcctggattacttccctcgtgttaaagtggtgcacacgtcgcaacacaaagaaggcgaggtttactccccagaaatcaattacattctcatggtactgtgtgtcggtgttatactaggatttggtggtggcaaggctatagggaatgctttcggtgttgtggtcatcatggtcatgctcataactacagtcctactcacccttgtgatgatcatcatatggagaacaccacttgtgcttgctgggctgtacttcgtccccttcttcatcatggaaggggcctatgtcagtgcagttttcaccaagatccctgaaggaggttggcttcctttcgcggtttccataacccttgcaatgatcatgttcggctggtactacggtcggcaaaggaaatttgagtacgagatgacaaacaaagtgagcttggagcacctcggcgagctcttggcaaggcctgaggttcagagggtccctggcctctgcttcttctacagcaacatacaggacgggctaactccaatcctcagccattacatcaagaacatgagctcactgcacacggtcacaatttttgtcaccctgaggtccctgctcgtcgccaaagttgatcaaagcaaaaggatcctgataaacaggcttggaccaaacggggtgtacggctgcaccgttcagtacggctacgccgacaacctcagcctcgagggcggcgacgacctcgccgcgcaggtcacgagctgcctgcaatggcacatccagatggacactgatggccgccggtcaccggaggaagagatggcgcagctggaggcggcgaggttggccggcgtggtgcacgtccggggcaagatgaggttctacgtcggcgaggacgccggctggtttgataagatcatgctcggattctatgagttcttgcatgggatctgccggtcggctctgccggttcttgggatgcctctgcaacagcgagttgagatcggcatgctgtacaaggtctgatgagctgttgatcgattgaatcactagtgttgtctgttgccttacgatgttgatcgattggaactaggaatcagacggttagaagtgtaagatcaggaaattgtgttactgcgttatgtaaactgtatacattatacgtatagaaaaattcagcacgtcgtactg

SEQ ID NO: 119 - protein, 707 aa, Oryza sativa
MDLEAGSIRPRSDGEGGGPAAGRETDDSNVWKDLFLAYKTLGVVFGGLVTSPLYVYPSMNLSSPTEADYLGIYSIMFWTLTLIGVVKYVCIALNADDHGEGGTFAMYSLLCRHADIGILPSKRVYAEEDPLLHSQSAIARRPSRLGKFFEQSITARRVLLFVAVLGMCMLIGDGILTPAISVLSAIDGIRGPFPTVSKPVVEALSAAILIGLFLLQKYGTSKVSFLFSPIMAAWTFTTPIIGLYSIVHYYPGIFKAISPYYIVHFFLRNKRQGWQLLGGTVLCITGAEAMFADLGHFSKKAIQIAFLSSIYPSLVLTYAGQTAYLINNVNDFGDGFYKFVPRPVYWPMFVVATLAAIVASQSLISATFSVIKQSVVLDYFPRVKVVHTSQHKEGEVYSPEINYILMVLCVGVILGFGGGKAIGNAFGVVVIMVMLITTVLLTLVMIIIWRTPLVLAGLYFVPFFIMEGAYVSAVFTKIPEGGWLPFAVSITLAMIMFGWYYGRQRKFEYEMTNKVSLEHLGELLARPEVQRVPGLCFFYSNIQDGLTPILSHYIKNMSSLHTVTIFVTLRSLLVAKVDQSKRILINRLGPNGVYGCTVQYGYADNLSLEGGDDLAAQVTSCLQWHIQMDTDGRRSPEEEMAQLEAARLAGVVHVRGKMRFYVGEDAGWFDKIMLGFYEFLHGICRSALPVLGMPLQQRVEIGMLYKV

SEQ ID NO: 120 - DNA, 2082 bp, Oryza sativa
atggcattctggctacttgcagacctgctgattcttctagcttccgccgccgagagcgtcgccggccagcctgctgccagttgccaggctaggtgcggcgacatcgacattccctacccgttcggcatcggccccaattgctctcgcggaaagggatttgagatcgcatgcaatccccgaaacgacagcggcgagatggtgccgacccttgccgccgccaatggcaccatccatgtgcagagcctgttggtagcgccgatcccggaggtcaaggtgatgctgccggtggcgtaccagtgctactactccaacaacagcatcaccgactcgttctacggcgaggtagacctcaacaacacaggcgtgtaccgcatctccgacagccgcaacatgttcgtcgtgattgggtgcaacaccctgtcctacacccagaacgggaacagcggcggcaaaggcccttacgccggcctctactacaccggctgcgtctcctactgtaacgactcgtcgagcgcgcgggacagcatgtgcgccggcgtcggctgctgccacatcgacatctcgccgggcctcagtgacaacgttgtctccttcgggccctggaagcgtggcttccaggtagacttcagcccctgcgactactccttcctcgtcgacaagaacgagtacgagttccgtagcgccgacctcaagatggacctcaaccgaaccatgccggtgtggctggactgggccatccgcgactccgttacctgccctccactggaggtgcaggagaagaaaccggctgggtacgcgtgtatgagcgacaacagcgagtgcgtcaactccaccaacggtcccggatactactgcaagtgcaagcaaggctacgatggtaacccctacgtcgacaaggaccaaggttgcaaggacatcaacgagtgtgatgtgtccaacaagaagaaatatccctgctacggcgtctgcaacaacatcccaggggattatgagtgccactgccgtgtaggataccagtggagtggtgaaggccccaagaaacaagagtgcagcgcaaaattccctcttgcagcaaggcttgcccttggaatcactttgggattttccttcctaattgttgctgttcttttcacgctaatgatgcacaaaaagcgaaaaatgaatgaatatttcaaaaagaatggtggttcagtgctacagaaagtggacaatatcaagattttcaccaaagatgagctaaagaaaatcacaaagaataattcagaagttcttggtcaaggaagctttggtaaggtgtacaaagggactcttgaagacaatactccggttgcagtgaagacgtcaatcgaagtaaatgaagctcgaaaggatgatttcacaaatgaagtgatcatccaatcgcaaatgatgcataataacattatcaagcttttgggttgttgcttggaagtggatgttccaatgttggtgtatgagtttgccgctaaggggaatctgcaagacattctccatggtgatgccaacatccctctcccgttgggcttacgcctagacatcgcaattgaatcagctgaaggtctaaggtacatgcactcatcaacaagtcgtaccatacgacatggtgatgtcaagccggccaacatacttttaacagataagtttatccccaagatctcagattttggaacatctaagcttcttaatgtagacaaagatttcaccatgtttgttgtaggaagtatgggctacatagatccagtattccataagaccggccatttaacacaaaagagtgatgtatacagttttggagttgtactgctagagctcatatgtagaaagccaacaatatatggtgaaaattgtagcctcatcattgagttccaaaatgcctatgatcaagagaacagtgggaggataatgttcgacaaggagattgcaaatgaagaagatatcctaatcctagaagaaattggcaggttggcaatggagtgtttgaaagaaaaggttgaagagcgacctgatatgaaggaggtagcagaacgatttgttatgctgagaagatcaaggaagtgtggatag

SEQ ID NO: 121 - protein, 693 aa, Oryza sativa
MAFWLLADLLILLASAAESVAGQPAASCQARCGDIDIPYPFGIGPNCSRGKGFEIACNPRNDSGEMVPTLAAANGTIHVQSLLVAPIPEVKVMLPVAYQCYYSNNSITDSFYGEVDLNNTGVYRISDSRNMFVVIGCNTLSYTQNGNSGGKGPYAGLYYTGCVSYCNDSSSARDSMCAGVGCCHIDISPGLSDNVVSFGPWKRGFQVDFSPCDYSFLVDKNEYEFRSADLKMDLNRTMPVWLDWAIRDSVTCPPLEVQEKKPAGYACMSDNSECVNSTNGPGYYCKCKQGYDGNPYVDKDQGCKDINECDVSNKKKYPCYGVCNNIPGDYECHCRVGYQWSGEGPKKQECSAKFPLAARLALGITLGFSFLIVAVLFTLMMHKKRKMNEYFKKNGGSVLQKVDNIKIFTKDELKKITKNNSEVLGQGSFGKVYKGTLEDNTPVAVKTSIEVNEARKDDFTNEVIIQSQMMHNNIIKLLGCCLEVDVPMLVYEFAAKGNLQDILHGDANIPLPLGLRLDIAIESAEGLRYMHSSTSRTIRHGDVKPANILLTDKFIPKISDFGTSKLLNVDKDFTMFVVGSMGYIDPVFHKTGHLTQKSDVYSFGVVLLELICRKPTIYGENCSLIIEFQNAYDQENSGRIMFDKEIANEEDILILEEIGRLAMECLKEKVEERPDMKEVAERFVMLRRSRKCG

SEQ ID NO: 122 - DNA, 1503 bp, Oryza sativa
tggaaaggcgccgccgagatggtgctcgcgaggtgcaccgtgtacgtcggcgcagacggcgccgcgcgcgagctcggcgtggagcagaggaggaagctcgagcaggtgatcaacgacatggcggcggcgagcctccgctgcatcgcgttcgcctacaagcaagtcgtcgacggcggcgacagcgacaacgccaagatcgacgacgaggggctgacattgctgggcttcgtcggactgaaagacccgtgcagaccagaggtaaaatccgccatcgaagcttgcaccaaagcaggcatcgccgtcaagatggtcaccggcgacaacgtcctcaaggctcgcgccatcgccaaggaatgcggcatcatctccggcaacgacgacgacgccgccggcgtcgtgatcgaggggcacgagttccgcgccatgtcggagcaggagcagctcgccatcgtcgacaacatccgcgtcatggcgcggtcgctgccactcgacaagctggtgctcgtccagcgcctgaagcagaagggccacgtggtggccgtcaccggcgacggcacgaacgacgcgccggcgctgaaagaagccgacgtgggcctctccatgggagtccagggcaccgaggtcgccaaggagagctccgacatcgtcatcctcaacgacaacttcgacacggtggtgacggcgacgcggtggggccgctgcgtgtacaacaacatccagaagttcatccagttccagctcaccgtcaacgtcgcggcgctcgtcatcaacttcgtgtcggcggtgaccacgggcaggatgccgctgaccacggtgcagctgctgtgggtgaacctgatcatggacaccatgggcgcgctggcgctcgccacggacacgccgacggcggggctgatgcgccgcccgcccatcggccgcgcggcgccgctgatcagcaacgccatgtggcgcaacctggcggcgcaggcggcgtaccaggtggccgtgctgctggcgctccagtaccgcggcttcggcggcgccggcgccggcgagagggcgaacgggacgatgatcttcaacgcgttcgtgctgtgccaggtgttcaacgagttcaacgcgagggagatcgagaggaggaacgtgttcgccggcgtgcaccggaacaggatgttcctgggcatcgtcgccgtcacggtggcgctgcaggtggtgatggtggagttgctgaccaagttcgccggaacggagaggctggggtgggggcagtggggcgcctgcgtcggcattgccgccgtgtcgtggcccatcgggtgggccgtcaagtgcatcccggtgccggagcggccgttccacgagatcatcacggcgaggaggaggaggagaagatcgacataactatcaacgcttaccactgttcatattttcggatttttgtcggtagcttaggccattcttttggagatattataccatcttgttatttgccatatataatatgatatatgatttgtttggttcatc

SEQ ID NO: 123 - protein, 452 aa, Oryza sativa
MVLARCTVYVGADGAARELGVEQRRKLEQVINDMAAASLRCIAFAYKQVVDGGDSDNAKIDDEGLTLLGFVGLKDPCRPEVKSAIEACTKAGIAVKMVTGDNVLKARAIAKECGIISGNDDDAAGVVIEGHEFRAMSEQEQLAIVDNIRVMARSLPLDKLVLVQRLKQKGHVVAVTGDGTNDAPALKEADVGLSMGVQGTEVAKESSDIVILNDNFDTVVTATRWGRCVYNNIQKFIQFQLTVNVAALVINFVSAVTTGRMPLTTVQLLWVNLIMDTMGALALATDTPTAGLMRRPPIGRAAPLISNAMWRNLAAQAAYQVAVLLALQYRGFGGAGAGERANGTMIFNAFVLCQVFNEFNAREIERRNVFAGVHRNRMFLGIVAVTVALQVVMVELLTKFAGTERLGWGQWGACVGIAAVSWPIGWAVKCIPVPERPFHEIITARRRRRRST

SEQ ID NO: 124 - DNA, 1404 bp, Oryza sativa
aatcaagcatcaatccctcattagcatcgctggttgatactaaactaacagtagccataatcatgggaaggccagtggcaacgctgctggtgctgtgcttcatctctgtcacggcgcgcgccgccgcgttccgcgtgcacggccgcctcctcgccgacgccgcgacggagggaggcgccgtcgtgcccatccactggacccaggcaatgaactacgtcgcgaacttcaccatcggcacgccgccgcagccggcgtcggcggtcatcgacctcgccggggagctcgtctggacgcagtgcaagcagtgcggccgctgcttcgagcagggcacgccactgttcgacccgaccgcgtcgaacacctaccgggcggagccgtgcggcaccccgctctgcgagtccatcccgagcgacgtccgcaactgctccggcaacgtgtgcgcgtacgaggcgtccaccaatgccggggacaccggcggcaaggtcggcaccgacaccttcgccgtcgggacggccaaggcgagcctcgcgttcgggtgcgtcgtggcgagcgacatcgacaccatgggcgggccttccgggatcgtcgggctagggaggacgccgtggtcgctagtcacccagacgggcgtcgccgcgttctcctactgcctggcgccgcacgacgccgggaagaacagcgcgctgttcctcggctcctccgcgaagctcgccggcggcggcaaggccgcctcgacgccgttcgtcaacatctccggcaacggcaatgacctgagcaactactacaaggtccaactcgaagggctgaaggccggcgacgcgatgatcccgctgccgccgagcggcagcaccgtcctgctcgacaccttctcgccgatcagcttcctcgtcgacggcgcttaccaggccgtcaagaaggcggtgacggtcgccgtcggcgcaccgccgatggcgacgccggtggagccgttcgacctctgcttcccgaaatcgggggcgagcggcgcggcgccggacctcgtgttcacgttccggggcggcgccgccatgacggtgccggcgacgaactacctgctcgactacaagaacggcacggtgtgcctcgccatgctgagctcggcgcggctgaactcgacgacggagctgagcttgctgggaagcttgcagcaggagaacatccatttcctcttcgacctcgacaaggagacgctctccttcgagcctgcagactgcactaaactctcctagctaatcaatggctgctgctacttaattactttcttcatatgtatgtgtacttctgaataacgcagccttgcggcatgagctgcagcatgctcatgttggtgaaaataatactccattcttattattattctgtggcgatctggcctacttcgatttc

SEQ ID NO: 125 - protein, 394 aa, Oryza sativa
MGRPVATLLVLCFISVTARAAAFRVHGRLLADAATEGGAVVPIHWTQAMNYVANFTIGTPPQPASAVIDLAGELVWTQCKQCGRCFEQGTPLFDPTASNTYRAEPCGTPLCESIPSDVRNCSGNVCAYEASTNAGDTGGKVGTDTFAVGTAKASLAFGCVVASDIDTMGGPSGIVGLGRTPWSLVTQTGVAAFSYCLAPHDAGKNSALFLGSSAKLAGGGKAASTPFVNISGNGNDLSNYYKVQLEGLKAGDAMIPLPPSGSTVLLDTFSPISFLVDGAYQAVKKAVTVAVGAPPMATPVEPFDLCFPKSGASGAAPDLVFTFRGGAAMTVPATNYLLDYKNGTVCLAMLSSARLNSTTELSLLGSLQQENIHFLFDLDKETLSFEPADCTKLS

SEQ ID NO: 126 - DNA, 1401 bp, Oryza sativa
acaatcaagcatcaattcctcattagcatcgctggttgatactaaactaacagtagccataatcatgggaaggccagtggcaacgctgctggtgctgtgcttcatctctgtcacggcgcgcgccgccgcgttccgcgtgcacggccgcctcctcgccgacgccgcgacggagggaggcgccgtcgtgcccatccactggacccaggcaatgaactacgtcgcgaacttcaccatcggcacgccgccgcagccggcgtcggcggtcatcgacctcgccggggagctcgtctggacgcagtgcaagcagtgcagccgctgcttcgagcaggacacgcccctgttcgacccgaccgcgtcgaacacctaccgggcggagccgtgcggcaccccgctctgcgagtccatcccgagcgacagccgcaactgctccggcaacgtgtgcgcgtaccaggcgtccaccaatgccggggacaccggcggcaaggtcggcaccgacaccttcgccgtcgggacggccaaggcgagcctcgcgttcgggtgcgtcgtggcgagcgacatcgacaccatgggcgggccttccgggatcgtcgggctagggaggacgccgtggtcgctcgtcacccagacgggcgtcgccgcgttctcctactgcctggcgccgcacgacgccgggaggaacagcgcgctgttcctcggctcctccgcgaagctcgccggcggcggcaaggccgcctcgacgccgttcgtcaacatctccggcaacggcaatgacctgagcaactactacaaggtccaactcgaagggctgaaagccggcgacgcgatgatcccgctgccgccgagcggcagcaccgtcctgctcgacaccttctcgccgatcagcttcctcgtcgacggcgcctaccaggccgtcaagaaggcggtgacggccgccgtcggcgcaccgccgatggcgacgccggtggagccgttcgacctctgcttcccgaaatcgggggcgagcggcgcggcgccggacctcgtgttcacgttccggggcggcgccgccatgacggtgccggcgacgaactacctgctcgactacaagaacggcacggtgtgcctcgccatgctgagctcggcgcggctgaactcgacgacggagctgagcttgctgggaagcttgcagcaggagaacatccatttcctcttcgacctcgacaaggagacgctctccttcgagcctgcagactgcactaaactctcctagctaatcaatggctgctgtgctgctacttaattactttcaggaagcaggagagtgcaggctatatgtatgtgtacttctgaataacgcagccatatatgcggcatgagctgcacgctgctcatgttggtgaaaataatacccccattcttatt

SEQ ID NO: 127 - protein, 394 aa, Oryza sativa
MGRPVATLLVLCFISVTARAAAFRVHGRLLADAATEGGAVVPIHWTQAMNYVANFTIGTPPQPASAVIDLAGELVWTQCKQCSRCFEQDTPLFDPTASNTYRAEPCGTPLCESIPSDSRNCSGNVCAYQASTNAGDTGGKVGTDTFAVGTAKASLAFGCVVASDIDTMGGPSGIVGLGRTPWSLVTQTGVAAFSYCLAPHDAGRNSALFLGSSAKLAGGGKAASTPFVNISGNGNDLSNYYKVQLEGLKAGDAMIPLPPSGSTVLLDTFSPISFLVDGAYQAVKKAVTAAVGAPPMATPVEPFDLCFPKSGASGAAPDLVFTFRGGAAMTVPATNYLLDYKNGTVCLAMLSSARLNSTTELSLLGSLQQENIHFLFDLDKETLSFEPADCTKLS

SEQ ID NO: 128 - DNA, 1615 bp, Oryza sativa
gcctaatcacccaacacaatcttgccataccatgggtcgatcgaaacgggaagttgccccgccacctcaagctttgccggcatccttcccatctggcatgtggctggctactccgccgatgcaggcctcctttgctcccggtggctggcaaggtacagcggctgcacctggtggctggcaaggtatggcgccaccgcagccgccgcaggctccattatttgcatacggcgccaatacttctgctccccatctggcccagatgaagcaagggtcagatcgtagttccatggacgattccttgtcagatctgcaagaaagtggtatggactcacgtccacctggtggattcttaagttactttcaggatccatcaagtttacagaatcatcaaccttctataccactaaattattatgctactcagcaagcagcaccatgggcaccttcacctgcagaataccgaagtccagttacaaaatcaggtccaggagaacaacaccctatcaacattgatagtggtggtgaagaaacccccactgttaggactgagaagcggttgacatggacacatgaagaggacataaggctagtgagtgcttggttgaacaacttgaatgattcgatcaatggtaatttcaagaaaaatgattgttattggggagatgttacaactgcctacaatagcaccactccgagaaataggatgaggcaagaaaaacaaatcaaggaccgctttcataaaattaagaaaaatgttggccgtttttgctgtgcttataaggaggtgaaatctatctatgttagtggacaaaatgaactacaattgatggagaaggtccatgcaacatatgaagcagattacaaggaaggccaatttacatttctgcattgttggaaagctctccgtgaccaaccaaagtggcatgcttacttggaggaacttgagaagccaaacaaaacaaagtcagataatgaagtggaagtaagggaacttacatccactcctaatagccctgaagatattatacgtcctgaaggaaccaaagctgctaaggcgcggcgtaatggtaaagacaaacgcaaaaggaaggcaaaggtttatctatcggatatggatgatgagattgacaagcctaaagaagttcagaacatggcagataaaggtcgcgatgagctactggagactcagaggcgtgtttctagtgagaatcttgaatcaaaaaggttagctcacctggcagccatggagcacaaggaggcggttatgttggaaacatatcgggctctcatgttgcaagatacaaaagatatgcctgatgatgtcagatttgagcatgtgatggcattgaagagtatgagggaaaagttgtttcctaaaactaaggtatcgaagatgctcattttggctgcttgttttggcagtgcttcagcaagagaagctacttattacataattttcagtaatccaccgattttatcaaaacagaacttgtgttctaactatctactcagtatgtcgttgtatgggtcactgttatggcctatgaatgatgtatggatcattgtaatagactaagttcttttgtcagtctatgaactaattagtagttttgcc

SEQ ID NO: 129 - protein, 514 aa, Oryza sativa
MGRSKREVAPPPQALPASFPSGMWLATPPMQASFAPGGWQGTAAAPGGWQGMAPPQPPQAPLFAYGANTSAPHLAQMKQGSDRSSMDDSLSDLQESGMDSRPPGGFLSYFQDPSSLQNHQPSIPLNYYATQQAAPWAPSPAEYRSPVTKSGPGEQHPINIDSGGEETPTVRTEKRLTWTHEEDIRLVSAWLNNLNDSINGNFKKNDCYWGDVTTAYNSTTPRNRMRQEKQIKDRFHKIKKNVGRFCCAYKEVKSIYVSGQNELQLMEKVHATYEADYKEGQFTFLHCWKALRDQPKWHAYLEELEKPNKTKSDNEVEVRELTSTPNSPEDIIRPEGTKAAKARRNGKDKRKRKAKVYLSDMDDEIDKPKEVQNMADKGRDELLETQRRVSSENLESKRLAHLAAMEHKEAVMLETYRALMLQDTKDMPDDVRFEHVMALKSMREKLFPKTKVSKMLILAACFGSASAREATYYIIFSNPPILSKQNLCSNYLLSMSLYGSLLWPMNDVWIIVID

SEQ ID NO: 130 - DNA, 576 bp, Oryza sativa
atggagaagtcaccggccatgcacttcctcctggaactggagtcccaagaaccggtttgcctcctcatcctcttcaccatgtttacctggttcatctcgaaggttcagatgatcctccctagttcttgccaacactgcaattatgccgtcaccaaggtgacctcgacaccggttctcgccgacagaaagatatcaaagaatctaagtaagcataaagatgatgggatagagatgacacatgaagatgttgagtctgtgatgacaaagatggggcctgattttgatcacggaaaaactatggtttacaaggagattggttctaactgcatgtcagagttgttcgatgacgatgaaccgagcttggacgaagtaaagcaggcatttttggtgtttgatgaggataatgatgggtacattgatgcattggatttgtatagagtccttaggaatctaggattaagagaaggtgtaggggttgatgagtgtgagcaaatgattgccaaatatgacatgaacagagataggaggatagatatggtagagttcattagggttctggaggccagttttttctga

SEQ ID NO: 131 - protein, 191 aa, Oryza sativa
MEKSPAMHFLLELESQEPVCLLILFTMFTWFISKVQMILPSSCQHCNYAVTKVTSTPVLADRKISKNLSKHKDDGIEMTHEDVESVMTKMGPDFDHGKTMVYKEIGSNCMSELFDDDEPSLDEVKQAFLVFDEDNDGYIDALDLYRVLRNLGLREGVGVDECEQMIAKYDMNRDRRIDMVEFIRVLEASFF

SEQ ID NO: 132 - DNA, 2349 bp, Oryza sativa
gggagattcatttgcatcagccgaaggcaagaatcacacaagactcggttggacgatttgcagcaaatagtagcatggggcaactccataatttgatgcttctgctgccgtgcctgatcttctctacgctactgcgcacagaggcgatgagtgtagctccagtgaaagtgagcaccacacccatcttccccacaatcccaagaggtcagacgaacaaggacttccaggtgctactgcgcgtcgaggcgccgccggcggccgatctcaacagccatgtccccttagacgtagtcgcggtgcttgatgtcagcggcagcatgaatgatccggtggcggcggcgtcgccgaagagcaatctgcaggggtcgaggttggatgtgctcaaggcgtccatgaagtttgtcatcaggaagcttgctgatggtgatcgcctctccatcgtggcgtttaacgatggacccgtcaaggaatatagctccggcttgttggatgtttccggcgatggccggagcatcgccggaaaaaagattgaccggcttcaggcccgtggtggcactgcgcttatgccagccctggaggaggccgtcaagatccttgatgagcggcaaggcagcagccggaaccacgtagggttcatcctcctcctcaccgacggcgacgacacgaccggattccggtggacccgcgacgccatccatggcgccgtcttcaagtaccccgtccacaccttcggcctgggcgcgtcccacgacccggaggcgctgctccacatcgcgcaaggatcgcgcggcacctactccttcgtcgacgacgacaacctcgccaacatcgccggcgccctcgccgtgtgccttggcgggctcaagaccgtcgccgccgtcgacacgcgcgtcagcctcaaggccgccgagctaagcggcggcggcgcgcggatagtgcgcgtagactccggcggctacgagagcagcgttgcttgcggcggggcctccggtgaggtcgtcgtcggcgtgctctacaccggcgaggtgaagaacttcgtcgtccacctccacgtgccggctgcttcgtcgacgaccttgaccttctcgtcggtggagtgcggcggctactacgacgccgccacggtctgcgaccactgccatcaccgtcaccagcagcagctgctcgccgtcggctactcgtacagccacgctccgggcgccgcctctgcagcggtgtccgtcgaagggcacggcgtgttcgtcgagaggcccgaggtggcggccgtcttcgtctccgtcgacggcgtcggcgtcggcggcggccgacagcgacaaatccccctcccctcccccgtcgtgatgcagcacatggtccggttcgagctgctggagctcgtcgccggcttcgcggaagccgagatggcgtcgaagccggcggcgacgacgacgcagccgcgcgccgccgacgtgctgcagggcaagtgggaggagttccggcgagcccggcagttctggggcggcgtcgagctggacggcgtggagaaggaggtggacgccatggtggccagcctcaggagcgggctagcctacgtcagctcgttggtgtcgagccaccagatgcagcgcgccaccgccatgggctcgccggagaaggtggtggccgagttcatgactccggcgatggtgatcattgtggaggaggcgcggaagctaccgccaccaccgccgccgccgccggcagctgctgaggcggcgagagagaggcccagcggctgcgatggcggcgacgatatccatcacgtgatccggcagcggcttgagctgtggtcaaaggtgagacgcgaggtgccgctcatgtaccagccgtcgccggagcaggaagacgtccagctgaccgccgtgttccgggaggcgtcgctggaggccatcgaccgagcaatgcaccacgacatctacctggccgttgtgcacgtgagcaaccagaggcgatgctagattgctgtccacggcgatccggcgccagaagtggaattagccgatgaagcagcttgcaagcataatgcttgttagctatataattaatcttataagtattttgccatatgcatgtctattgcgttgatttgcatgtattgaacaagtgtatgagctttgcctatgttgctagctcgtagagatcaatcgatctgtgtgtatgcatcacgagattatgtactggagagcagagagctagtaatatccggcagtcgtgtgagttgtgccgttgccgttggcggcaagagcaagctggcggatctgctcattttccattactgtatccattttccttctcaataaataatattatctcgtgatcgattatcctacc

SEQ ID NO: 133 - protein, 633 aa, Oryza sativa
MGQLHNLMLLLPCLIFSTLLRTEAMSVAPVKVSTTPIFPTIPRGQTNKDFQVLLRVEAPPAADLNSHVPLDVVAVLDVSGSMNDPVAAASPKSNLQGSRLDVLKASMKFVIRKLADGDRLSIVAFNDGPVKEYSSGLLDVSGDGRSIAGKKIDRLQARGGTALMPALEEAVKILDERQGSSRNHVGFILLLTDGDDTTGFRWTRDAIHGAVFKYPVHTFGLGASHDPEALLHIAQGSRGTYSFVDDDNLANIAGALAVCLGGLKTVAAVDTRVSLKAAELSGGGARIVRVDSGGYESSVACGGASGEVVVGVLYTGEVKNFVVHLHVPAASSTTLTFSSVECGGYYDAATVCDHCHHRHQQQLLAVGYSYSHAPGAASAAVSVEGHGVFVERPEVAAVFVSVDGVGVGGGRQRQIPLPSPVVMQHMVRFELLELVAGFAEAEMASKPAATTTQPRAADVLQGKWEEFRRARQFWGGVELDGVEKEVDAMVASLRSGLAYVSSLVSSHQMQRATAMGSPEKVVAEFMTPAMVIIVEEARKLPPPPPPPPAAAEAARERPSGCDGGDDIHHVIRQRLELWSKVRREVPLMYQPSPEQEDVQLTAVFREASLEAIDRAMHHDIYLAVVHVSNQRRC

SEQ ID NO: 134 - DNA, 845 bp, Oryza sativa
atttcggtagctggtttgctattaacactttaattttgcatgcagcaattaaggtgttaattaatatatataattaagctttaagctcattagtttaccgacgatggaagtggccaccaatacggcgacacgatcgccggtgaagctaatgctggtgctgacactgtcgccggcgagcaaggtgatcgccaagggcggcggcggcgtgaagcgggtgcacctcgacggcggcgcgttccagtgccggacatgcgggcggcggttctccacgttccaggctctcggcggccaccggaccagccacaagcggccgcgggtgcgcgccgacggccttgacctcctcctcggcgcgcgccccggcaagctcggcgccggcggcgcctcgacgccggtagtgcaccggtgcgacatgtgcggcaaggtgttcgccaccggccaggcgctcggcggccacatgcgccgccaccggccgctggtgagtcgtaatggcacaatgtccacgacgtggacggcggcggcggcggcggcggcgacaatgtccggctcctcgtcggaagagcgtgacgacgacgacgacgacgacgtgcacaattataatttcatccactttttgtgagtggctaatggacaaatcaatatatgaattgaataaaaccagtgattaatgtcaataataattaagtttgttctggagtggtatacaaacacgcaacatgcttatagctagatatatatacacgtatacgccacaagatacaataccaattaagttcgtctttgattttgtaatgttcaattatattttttcaatgattaaatacacgtgattttaattgtattcgttc

SEQ ID NO: 135 - protein, 170 aa, Oryza sativa
MEVATNTATRSPVKLMLVLTLSPASKVIAKGGGGVKRVHLDGGAFQCRTCGRRFSTFQALGGHRTSHKRPRVRADGLDLLLGARPGKLGAGGASTPVVHRCDMCGKVFATGQALGGHMRRHRPLVSRNGTMSTTWTAAAAAAATMSGSSSEERDDDDDDDVHNYNFIHFL

SEQ ID NO: 136 - DNA, 905 bp, Oryza sativa
atagactacagctatacaagaagcatcgaccactacttgtacacaagcaaaagttccatcaacttaacatggcctcctcgaacttctttcttctcacagctctcatcgctttggtcgctactcaggccatggcttctgatcccagtcctcttcaggacttctgcgttgccgacaggaactctccagtacatgtcaatgggttcccttgcaaggatgctaaagatgtgaatgttgatgacttcttcctagcagctaacctcgacaagccgatggacacaaccaagagcaaggctggatccaatgttacattgatcaatgtgatgaaactcgcaggtctcaacacccttggcatctccatggcaaggatcgactatgctcctaaagggcaaaacccaccacacacgcatccccgtgctaccgagatcctaactgttcttgagggtacactctatgttggttttgttacatcgaaccaagcaaacggagaaaacaagctcttcaccaagacacttaacaagggtgatgtcttcgtgttcccacaaggtctcattcacttccagttcaatccaagctatgataagccagcagttgccatcgctgcacttagcagccagaaccctggagcgattaccattgctaatgcagtatttggatcaaattcaccaatctcggatgacgttcttgctaaggcatttcaggtggacaagaaagctgtggattggctccaagctcagttctgggagaacaaccataactaaattattgatgcttgataaggttcaaaactagtgattggtagtaaaaagagtttgttgattattatattagctaaatattgtatacttcatgtaatcctaaactcgatattttatatgattctttttatgaataatgtatatcagtac

SEQ ID NO: 137 - protein, 229 aa, Oryza sativa
MASSNFFLLTALIALVATQAMASDPSPLQDFCVADRNSPVHVNGFPCKDAKDVNVDDFFLAANLDKPMDTTKSKAGSNVTLINVMKLAGLNTLGISMARIDYAPKGQNPPHTHPRATEILTVLEGTLYVGFVTSNQANGENKLFTKTLNKGDVFVFPQGLIHFQFNPSYDKPAVAIAALSSQNPGAITIANAVFGSNSPISDDVLAKAFQVDKKAVDWLQAQFWENNHN

SEQ ID NO: 138 - DNA, 1620 bp, Oryza sativa
ccgagtacggcgaccaccgcttccgccgcagcgacttcttcctcgccgtcgaggcctacctcagccacgcctgcgcccgccgcgcccgcaggctcaaggccgacctcggcagggacgccaggagcgtccaggtctccgtcgacgaccaccaggaggtcaccgactccttccgcggcgccacgctctggtggtacccttcctccatgtccaacaagtccagcgtcatcagcttctaccccggcgaggatgagcgccgcctctaccgcctcgtcttccaccgccgccaccgcgacctcgtcctcgacggctacctcccccacgtcctcgccgagggccgcgccgtcaccgtccgcaaccgccagcgccgcctcttcaccaacaacgccagcaccagctggaacccctaccgccgcgggaagggcgtctggagccacgtgcccttcgagcacccggccagcttcgacacgctcgccatggaccccggcgacaaggacgccatcgtcgtcgacctcgtggcgttccgcgacggcaaggactactacgccaaggtgggcaagccatggaagcgcggatatctgctctacggcccgcccggcaccggcaagtccaccatgatcgccgccatggccaacttcctcgactacgacgtctatgacctcgagctcacggccgtcaagaacaacaccgagctgcgcaagctctacatcgagaccaccggcaagtccatcatcgtcatcgaggacatcgactgctccatcgacctcaccggcaagcgcaagaagtcctccggcgacaacaaggcgtccgacggcggcggcgagggcagcgacgacaaacccaagctgccgaccgaggcggacaaggacgacggcggcagcaaggtgacgctgtcggggctgctcaacttcatcgacgggctgtggtcggcgtgcggcggcgagcggatcatcatcttcacgacgaaccacaaggagaagctggacccggcgctgatccggcgggggaggatggacgtccacatcgagatgtcctactgcggcttcgaggcgttcaaagtgctggccagcaactacctcggcgtggagcagcacgagctgctaggcgacatacggcggctgctcgaggaggccgacatgtcgccggcggacgtcgccgagaacctgatgcccatgtccaagaggaagaagagggaccctgacgcgtgcctggcaggtctagtcgaggcgctgaacatggccaaggaggaagcacaagcaaacaaggcggcgaaagaggacgaggaggcaaaggcagcgaaagggatagaagagatgaaaaccaaagagcaggcaacgaccaacggtgaagacgaagggaaggacaaaaggacatcggaagagaacaaggccaacggcgacatatagatattactagcaagtgggatcatatcgggcagctgcagatccctggagttgcaagccatgtatcctagcagagtgctcatgaagattttcaacctttatttttacataacagtttgctaatagggcctgcgaaattgttagcatttccgtattatattaaggctgatagttgcttgtattttgtaagaatataataatgctatgcacgccttcaagc

SEQ ID NO: 139 - protein, 399 aa, Oryza sativa
MSNKSSVISFYPGEDERRLYRLVFHRRHRDLVLDGYLPHVLAEGRAVTVRNRQRRLFTNNASTSWNPYRRGKGVWSHVPFEHPASFDTLAMDPGDKDAIVVDLVAFRDGKDYYAKVGKPWKRGYLLYGPPGTGKSTMIAAMANFLDYDVYDLELTAVKNNTELRKLYIETTGKSIIVIEDIDCSIDLTGKRKKSSGDNKASDGGGEGSDDKPKLPTEADKDDGGSKVTLSGLLNFIDGLWSACGGERIIIFTTNHKEKLDPALIRRGRMDVHIEMSYCGFEAFKVLASNYLGVEQHELLGDIRRLLEEADMSPADVAENLMPMSKRKKRDPDACLAGLVEALNMAKEEAQANKAAKEDEEAKAAKGIEEMKTKEQATTNGEDEGKDKRTSEENKANGDI

SEQ ID NO: 140 - DNA, 1856 bp, Oryza sativa
aattctatcttgcactcacagatccatctaaacgcgcagcttggtcgccatggagcaagtcgcgtactggttcatctgcgcatgcgccttcttggctctcgtgctcctcgtcaggctgggcgccgcgcgccgcgacgtcgtgcgcctcccgccgggcccgtggcggctgccggtcgtcggcaacctccaccagctgatgctccggggaccgctcgtccaccgcaccatggcggacctagcgcgcggcctcgacgacgcgccgctcatgcgcctccagctcggcggcgtccccgtcgtcgtcgcgtcgtccgcggacgccgcgcgcgaggtgacgcgcacgcacgacctcgacttcgcgtcgcggccgtggccgcccaccgtgcgccggctgcgcccccaccgcgagggcgtggtgttcgccccctacggcgccatgtggcggcagctccgcaaggtgtgcgtcgtggagatgctcagcgcgcggcgcgtgcggtcgttccgccgcgtgcgcgaggaggaggccgcccgcctcgtcgcgtccatcgcctcgtcgtcgtcctcctcgccgaccggccacgacggcggcgccgcccccgccgtgaacgtcagcgcgccgatcgccgcggccgtggcggacgcgacgatgcgcgccgtgatcggggacaggttcgagaggcgggaggagttcctggagtcgatcacggaggcggtgaggagcttcacggggttcagcctggacgacctgttcccgtcgtcgaggctcgccgccgccgtcggcggcatgacgcgccgcgcggaggccagcatccggaagggccaccagctaatggacagcgccttccgacagcaccagcagctgagggacgccatggctgcgcagccgcatcttgatgattgcgccatggaggaggacctgttggacacgctcctcaggatccagaaggaagacaacctcgacgtgcctctcaccaccggcaacatcaaagccgttctcctggtatgtatacattaaatttgctttaacgtcaaacccgtcacagatgactcatcacagatgccaggttctatagtagtgggtgataatagtgtcattttcgctttgtataatgccgtaatatatacacaggacatctttggtgcggggagtgacacatcttcacacatggtccagtgggtcttgtcagagctaatgaggaacccagaagcgatgcacaaagcacaaatcgagcttcggagtacccttcaagggaagcagatggtaagtgaagacgacttggcaagcctgacgtacctaaagcttgtcatcaaggagaccctgaggcttcatcccgtggtgccattgcttctcccgagggagtgtcgtcaaacatgcaaggtcatggggtacgatgtgcctcaaggcaccaccgtgttcgttaacgtatgggcgattaacagagaccctaggcactgggatgagcctgaggtgttcaagccggaacggtttcacagtggaaagatcgactttaaaggtgcaaatttcgagtatataccgtttggtgcgggtaggaggatttgccctggcatgacattcggacatgctaccgtggagctcatgcttgcaatgcttctgtaccacttcgactgggagctccctaaaggagttgcaccgaacgaactagacatgacagaggagatgggcatcactgtgggtaggaagaatgctctttatctgcatcctatagtccgtgtgcccttggaacaagctactatgtcgtagttgtgctacataccatgggggttctctaccttgcattatcatgcttttatatataaatggttgtggcgacttaataaagtggttctcattttcattc

SEQ ID NO: 141 - protein, 320 aa, Oryza sativa
MEQVAYWFICACAFLALVLLVRLGAARRDVVRLPPGPWRLPVVGNLHQLMLRGPLVHRTMADLARGLDDAPLMRLQLGGVPVVVASSADAAREVTRTHDLDFASRPWPPTVRRLRPHREGVVFAPYGAMWRQLRKVCVVEMLSARRVRSFRRVREEEAARLVASIASSSSSSPTGHDGGAAPAVNVSAPIAAAVADATMRAVIGDRFERREEFLESITEAVRSFTGFSLDDLFPSSRLAAAVGGMTRRAEASIRKGHQLMDSAFRQHQQLRDAMAAQPHLDDCAMEEDLLDTLLRIQKEDNLDVPLTTGNIKAVLLVCIH

SEQ ID NO: 142 - DNA, 1211 bp, Oryza sativa
acaagaacacgcgccacatttgtcattcagacattcagtttgtgctggctgggcacttactgcatcgatcgatctcctcttcagaacaagaagagatcagctttggagctagctagcttagctagccggctgagctaatttcgccttgctttggtttttgtttttagtttatctgaaggagagggatttgtaagtgcaaggaactaaagcggcatctataacagatggaggatttggcaaagttcttgtttggagtttctggcaatgtcatcgcgctcttcctcttcttatccccagtgcctactttctggaggatcattcggaggaaatcaacagaggatttctctggggtgccatacaacatgacactcatcaactgcctcctctctgcatggtacgggctgccgttcgtgtccccaaacaacatcctggtgtcgacgatcaacggcgccggcgcggtgatcgagacggcgtacgtggtggtgttcctcgtgttcgcctccacccacaagacgcggctgcgcacgctcggcctcgccgcggccgtcgcgtcggtgttcgcggcggtggcgctcgtctccctcctcgccctccacggccagcaccgcaagctcctctgcggcgtcgccgccaccgtctgctccatctgcatgtacgcctcccccctctccatcatgaggctggtgatcaagacgaagagcgtggagtacatgccgttcctgatgtcgctggccgtgttcctgtgcggcacgtcgtggttcatctacggcttgctcggccgcgaccccttcgtcacgattccgaacgggtgcgggagctttcttggcgccgtgcagctggtgctctacgccatctaccgcaacaacaagggcgccggcggcggcagcggcggcaagcaggccggcgacgacgacgtggagatggccgaggggaggaacaacaaggtcgccgacggcggcgccgccgacgacgactcgacggccggcggcaaggcgggcaccgaagtgtagctctggcgtgcgtctcgaatcggctaagatttcccgcgtgtgttctacttctacaagtagtaatattagctagacccttgctgctttgatctttactagaaaggagagcgcggcgccacgccgcgcgcgatggcaaatagttctacataaaatggttagatagtagatacatattttgataaatatagtctacatttgttt

SEQ ID NO: 143 - protein, 261 aa, Oryza sativa
MEDLAKFLFGVSGNVIALFLFLSPVPTFWRIIRRKSTEDFSGVPYNMTLINCLLSAWYGLPFVSPNNILVSTINGAGAVIETAYVVVFLVFASTHKTRLRTLGLAAAVASVFAAVALVSLLALHGQHRKLLCGVAATVCSICMYASPLSIMRLVIKTKSVEYMPFLMSLAVFLCGTSWFIYGLLGRDPFVTIPNGCGSFLGAVQLVLYAIYRNNKGAGGGSGGKQAGDDDVEMAEGRNNKVADGGAADDDSTAGGKAGTEV

SEQ ID NO: 144 - DNA, 1968 bp, Oryza sativa
acgaaaacatagattagatcattagacgtgctattaatttgcgacctgttaaaaaataaagtacgaaaaaacatcaaaattaatctaaaattgagatttaaaattaaaattgaacatcaattgattaccgggagcgaggtaatcataattgagattcaaaattggtgtttgtgtggacatgtgaactcaacacagtggcggcgctgaacgcgattctggggaggtggggcacgaagccgccgacgacatggaacatcaccggcgacccttgcagcggcatcgccatcgacgaaacgaccgacatcgataacagcgaaaccatcaacccgggcatcaagtgcgactgctcctacgacaacacgaccgtctgccacatcaccaagctgagggtgtacgcgttggatgttgtcggtccgatacctgcagaactggagaatctcacctatctagctaacttgaatttacagcaaaattatttgacaggatctttaccggcatttattggagaaatgacggcattgcagtatcttttggtgggaatcaatgcgttaactggaattttaccaagggagcttggcaatctcaacaatctccttgcgttatgggcatccgacaatgatttcactgggagaatacctgattatattgggagcttatcagatttgacagagttgaggattcaaggaaacaattttgatggtcccatccctacaagtttttctaatctcgtcaatttgacatctttgcgaataggcgatttagtgagtgggagttcttcattggcttttatgtcaaacatgacatccttgattgttctaacactgaggaattgcaggatatctgacaaccttgcttcagtggacttctcaaaatttgtaggactttattacttggacttgagttttaacaacatcactggcaaagtgccttcagtccttttgaatctgaattcactcatttacctatttcttggaaacaacagcctctctgggagcttgccagacacaaagggtgctagccttaaagttctagatttctcctacaacgagctctctggaaagttcccttcttggtatagcacggaaagacatttacaagtgaatttggtgtggaacaacttcatgatagatagttcaaacagaagtattttgtcatcaggtctaaattgcctacagcgaaatactccatgtttacctgcttctccagatgattcctcatttgcagttgactccggtggtactagacccattataggctcagataaatcttattacgaacccgacgacacgaatttaggagaggcatcatactatgtttcgaactcaacaagatggggtattagcaacacggggaaattcatggaagccgctaattttagcttcatagtatacacttcacgccagtttacaaacacgcttgatagtgtactattccagacagccagaacgtcatcctcttcattgagatactatggcattggactaaagaatggattttacaacgtcgagcttcaatttgcagagatcttctttccagacaacacgacatggacaagcttgggaacaaggattttcgacatatttattcagggagaactcagagaaaaggatttcgatataaagaaacaaacaaatggaaaatcttatactgttgttttgaggcagtatgttgttagagttacagaaaatttcatggagattcaccttttctgggctggaaaaggaacttgttgcattcctagacagggatcctacgggccattaatctcagcattaagtgtatctccttatggtggcaacaataaggttgatcctggtcctattaaaaacagtgctggtaaaagtaaaatagctttggtagctggagttgttgtctgtactatagttttaggccttttatccacagggacatttctttggagacagaaaaggaaaaaaatggaggcggagatgggaggtagttaaaatt

SEQ ID NO: 145 - protein, 484 aa, Oryza sativa
MTALQYLLVGINALTGILPRELGNLNNLLALWASDNDFTGRIPDYIGSLSDLTELRIQGNNFDGPIPTSFSNLVNLTSLRIGDLVSGSSSLAFMSNMTSLIVLTLRNCRISDNLASVDFSKFVGLYYLDLSFNNITGKVPSVLLNLNSLIYLFLGNNSLSGSLPDTKGASLKVLDFSYNELSGKFPSWYSTERHLQVNLVWNNFMIDSSNRSILSSGLNCLQRNTPCLPASPDDSSFAVDSGGTRPIIGSDKSYYEPDDTNLGEASYYVSNSTRWGISNTGKFMEAANFSFIVYTSRQFTNTLDSVLFQTARTSSSSLRYYGIGLKNGFYNVELQFAEIFFPDNTTWTSLGTRIFDIFIQGELREKDFDIKKQTNGKSYTVVLRQYVVRVTENFMEIHLFWAGKGTCCIPRQGSYGPLISALSVSPYGGNNKVDPGPIKNSAGKSKIALVAGVVVCTIVLGLLSTGTFLWRQKRKKMEAEMGGS

SEQ ID NO: 146 - DNA, 1466 bp, Oryza sativa
gagtagcacatatagtactgcacgaagaactacaccatggcgcaaaatgtccaagaaaatgagcaggtgatgagcacggaggacttgctccaagctcagatcgagctctaccaccactgcttggccttcatcaagtccatggcacttagggccgccactgacctgcgtattcccgacgccatccactgcaacggcggcgctgccaccttaactgacctcgccgcccatgtcgggctgcacccgacgaagctctcccaccttcggcggctcatgcgcgtgctcactctctccggcatctttaccgtccatgacggcgacggcgaggccacctacacgctcacccgagtctctcgccttctcctcagcgacggcgtcgagagaactcacggcctctcgcaaatggtgcgcgtgtttgtgaacccggtcgccgtggcttcgcagttcagcttacacgagtggttcactgtcgagaaggcggccgccgtgtcactgttcgaggtggcgcacggctgcacccgttgggaaatgatagcaaacgattccaaagacggcagcatgttcaatgccggcatggtagaggatagcagtgtcgccatggatatcatcttgaggaagagcagcaacgttttccggggcatcaactcgcttgttgatgtaggcggtggctatggcgccgtagctgcagccgtagtgagggcattccctgacatcaagtgcacggtgttagatcttcctcacatcgtcgccaaggctcccagtaacaacaacatccagtttgtcggcggtgatctttttgagttcattccagcagccgatgttgtgctacttaagtgtattttgcactgttggcaacatgatgactgtgtcaagattatgcggcggtgcaaggaggcaatctcagcgagggatgctggaggaaaggtaatactcatcgaggtggttgttgggattggatcaaacgaaactgttcccaaggagatgcaacttctctttgatgttttcatgatgtacaccgatggcatcgagcgggaggagcatgaatggaagaagattttcttggaggctggatttagtgactacaaaatcataccggtgctgggtgttcgatcaatcattgaggtttacccttgatgctcctagaggtgtacatgtgcatctcaccatgtgacctactctagttcaaataattgaacaaaatgcataatatgttacttaaaaaccgatcggtttgatgttagtattttgatttccttttattcaggagtcagtagtgcgcacgatcacaccaaggccactgttctcattttcctatgtatgagctacaatacgcacgccgttggatggcacggcttatgcgcatcgtggctcaagtctcgggcatgttgttagcccaaaatttccattcctatattcaacataataagaggaagagaaaaccgaaaagctgcaaggcagttcgcagcacc

SEQ ID NO: 147 - protein, 364 aa, Oryza sativa
MAQNVQENEQVMSTEDLLQAQIELYHHCLAFIKSMALRAATDLRIPDAIHCNGGAATLTDLAAHVGLHPTKLSHLRRLMRVLTLSGIFTVHDGDGEATYTLTRVSRLLLSDGVERTHGLSQMVRVFVNPVAVASQFSLHEWFTVEKAAAVSLFEVAHGCTRWEMIANDSKDGSMFNAGMVEDSSVAMDIILRKSSNVFRGINSLVDVGGGYGAVAAAVVRAFPDIKCTVLDLPHIVAKAPSNNNIQFVGGDLFEFIPAADVVLLKCILHCWQHDDCVKIMRRCKEAISARDAGGKVILIEVVVGIGSNETVPKEMQLLFDVFMMYTDGIEREEHEWKKIFLEAGFSDYKIIPVLGVRSIIEVYP

SEQ ID NO: 148 - DNA, 1971 bp, Oryza sativa
atggagttcttgtcgcagatgtggtcgctgctgggcctcctcaccatcctgcagaacgtgctcccgacgcagctactctccctcctccactcgctgtggcagtcgctgcaggactcgctcacgccgtactcctacttcgacgtgccggagttcctcggctccgccgccgtcgagcccaacgcgttgtaccgccatgtccagctctacctccaccgctcactcctcctctcctcgccgccgcctccccgcctcacgctgtcgctgccgcgctccgtcgccgtctccggcggcggaggtgggcatgacgcgggagcggcagcggcggcggcgacgccgtccgtgtcgctctccccgaaccactcggtggctgacagcttcgacgggcaccgcgccgtgtggacgcaccacgccgacacgctccaggactcgctcgaggagcggcggtcgttctcgctgcggctgcccaagcggcacgccgcggcggtgctcccggcgtacctggcgcacctcgccgccgcggcggaccacctggagcggtcgtcgcgcgcgcggaggctgcacacgaacgcggcatccccgcgcggcgccgcggcgtggtcgtcggtgccgttctgccacccgtccacgttcgacacgctcgcgctcgacccggagctcaaggcgcgcctcctcgccgacctcacggcattcgccgacggcagcgagttctaccgccggacggggcggccgtggaagcgcgggtacctcctccacggcccgcccggctctggcaagtcctcgctcatcgccgccatggcgaaccacctccggtacgacgtgttcgacctcgagctcacccgcgtcgccaccaacgccgacctccgcgcgctcctcatccagaccaccaaccgctcgctcatcgtcatcgaggacatcgactgctccctccacctcaccggcgaccgcaagagcagacggaacaaaagacgccggctcctccacgccaccgccgcctccgacgacgactcgtcggactccgactccgacggcggcgacaaccaccgctccaaggtgacgctgtccgggctgctcaacttcaccgacggcctgtggtcgtgctgcggcgaggagcgcatcatcgtgttcacgacgaaccacgtcgacggcatcgacccggcgctgctccgcccggggaggatggacgtgcacgtgcgcctgggcgcctgcggcgcgcacgccatgcgcgagctggtcggccgctacgtcggcgtcgaggaccacgagatgctggacgcggcggagtgctgcgtccgcggcggcgccgagatgacgccggccgaggtgggagaagtgctgctgcggagcagggacgacccggacgccgcggtgacggagctcgccgtggagctcaaggcgaggcagagcgcggcggccgacgagctccagtgggaggactcggcggcggagctctccgacgagtcgccgaggaagaaagggttagggtgggagggcaaggtcaggtctccgtcaaagtttgacctaatgttcaaatctcaagattgtgttctgttaggaatcgagtgggctgccaatgggcctgtacaaccattcattcaagctggcccaagcaaacccaagccgctgatccatgggatttcaagcatggaggcaatggggaagtaccgctgcggcgtcccgtgcagttggtcattggatttgggcaaggctactgctcatggcaccaacgcccacaacctgttcggtgaaatgtcaagccaaggagaggtgtcccaagaagatctcaagatatctaaggccgtccccatcaattcccccatgaacaaagaggagaaaatgatggatgaagctctggatcagatattggagaagcttgaacaaatgaagaccaagcgtaggtgcaatgagaagattgatcagattttggagaagttggacgagatagaagctaataggcgctatagttggccataa

SEQ ID NO: 149 - protein, 656 aa, Oryza sativa
MEFLSQMWSLLGLLTILQNVLPTQLLSLLHSLWQSLQDSLTPYSYFDVPEFLGSAAVEPNALYRHVQLYLHRSLLLSSPPPPRLTLSLPRSVAVSGGGGGHDAGAAAAAATPSVSLSPNHSVADSFDGHRAVWTHHADTLQDSLEERRSFSLRLPKRHAAAVLPAYLAHLAAAADHLERSSRARRLHTNAASPRGAAAWSSVPFCHPSTFDTLALDPELKARLLADLTAFADGSEFYRRTGRPWKRGYLLHGPPGSGKSSLIAAMANHLRYDVFDLELTRVATNADLRALLIQTTNRSLIVIEDIDCSLHLTGDRKSRRNKRRRLLHATAASDDDSSDSDSDGGDNHRSKVTLSGLLNFTDGLWSCCGEERIIVFTTNHVDGIDPALLRPGRMDVHVRLGACGAHAMRELVGRYVGVEDHEMLDAAECCVRGGAEMTPAEVGEVLLRSRDDPDAAVTELAVELKARQSAAADELQWEDSAAELSDESPRKKGLGWEGKVRSPSKFDLMFKSQDCVLLGIEWAANGPVQPFIQAGPSKPKPLIHGISSMEAMGKYRCGVPCSWSLDLGKATAHGTNAHNLFGEMSSQGEVSQEDLKISKAVPINSPMNKEEKMMDEALDQILEKLEQMKTKRRCNEKIDQILEKLDEIEANRRYSWP

SEQ ID NO: 150 - DNA, 1269 bp, Oryza sativa
atgtagtacttaattgcacgaagaacaccatggcacaacgtgtccaagaagaagatgagcagatgacgagcaccgatgatttgatccaagctgagatcgagctctaccaccactgcttcgccttcatcaagtccacggcacttagggccgccactgacctgtgcatttccgatgccatccaccgcaatggcggcgctgccaccttgtctgacctcgccctcaatatcgggctgcacccgacgaagctctcccacctccggcggctcatgcgcgtgcccactgtctctggcgtattcgccgtcgaagaccacaatgcattcatgagtggttcaccatcgagcaagcagccgccatgacacccttcgaggtggcgcacggttgcacgcggtgggagattatagcaaatgatgccaaggatggtagcgtgttcaacaccgccatggttgaggacagccgtgtcgccatggatatcatcttgaaggagagctgtggcgttttccagggcatcagctctctggttgatgttggcggtggccatggtgctgcagctgcagctatagcgacggcattcccaaacatcaagtgtacggttttggatctccctcatatcgtcgccgaggctcccaccacccatagcaacatccagttcgtcggtggtgactttttcgagtttattccagcagctgatgttgtgctacttaagtatattttgcatgcttggcaagatgatgattgtgtcaagattctgcggcggtgcaaagaggcaatcctggcaagggatgctgggggaaaggtgataattattgaggtggttgttgggattggacccaaggaaattgttcccaaggagatgcaaattttgtttgatgttttcatgatgtacgttgatggcatcgagcgagaggagcatgaatggaagaagattttcttagaggctggattcagtgactacaaaatcacaccagtgctaggtgcccgatcgatcatcgaggtttacccttgatgcttctgaaggtgtagatgtgcatctctgcgtggaacctattctagttcagtagccttgaggcatgcgcgtgttcacgtcgaggccatcattttttgtttttctgttgtcatatgtgctatagtatattgtgcgttgtgggatggcacaactcatgcatgtcgtggcttaagtctcgggcatattggtagcctcgatttccatttctatattcatcacaataagaggaagagaaaaccaaaagctacaaggcagtttgtagcgcc

SEQ ID NO: 151 - protein, 216 aa, Oryza sativa
MTPFEVAHGCTRWEIIANDAKDGSVFNTAMVEDSRVAMDIILKESCGVFQGISSLVDVGGGHGAAAAAIATAFPNIKCTVLDLPHIVAEAPTTHSNIQFVGGDFFEFIPAADVVLLKYILHAWQDDDCVKILRRCKEAILARDAGGKVIIIEVVVGIGPKEIVPKEMQILFDVFMMYVDGIEREEHEWKKIFLEAGFSDYKITPVLGARSIIEVYP

SEQ ID NO: 152 - DNA, 1483 bp, Oryza sativa
gtggcacttgtagtactttactgcacgaagaacaccatggcacaacgtgtccaagaagaagatgagcagatgatgagcaccgatgacttgatccaagctcagatcaagctctaccaccactgcttcgccttcatcaagtccacagcactttgggccgccatcgacctgcgcattgcggatgtcatccaccgcaatggcggagccgccaccttatccgacctcgcgctcaacgtcgggctgcacccgaccaagctctcccacctccggcggctcatgcgcgtgctcaccgtcactggcatattcgctgtcgaagaccgcaatggtgaggccatgtacacactcacccgagtctctcgccttctcctcaacagcgatggggagggaacgcacgccttgtcccaaatggcgcgtgtgttagccaacccactcgccgtgatctctcatttcagcattcacgagtggttcaccaccgagaaggcaaccaccatgacacccttcgaggtggcgcatggttgcacgcggtgggagatgatagcgaacgatgccaaggatggcagcgtgttcaacgccggcatggttgaggacagccgtgtcgccatggatatcatcttgaaggagagctgtggcattttccagggcatcagctctcttattgatgttggtggtggccatggcgctgcagctgcagccatagcaacggcattcccaaacatcaagtgcactgtgctggatctgcctcatattgttgctgaggctcccgccactcatagcaacatccagtttataggtggtgaccttttcaagttcattccagcagccgatgttgttctacttaagtgtcttttgcactgttggcaagatgatgattgtgtcaagattctgcgactatgcaaagaggcaatcccggcaagagatgctgggggaaaggtgataattattgaggtggttgtcgggattggatccgaggaaattgttcctaaggagatgcaacttttgtttgatgttttcatgatgtacatcgatggcatcgagcgagaggagtatgaatggaagaagattttcttagaggctggattcagtgactacaaaatcaccccggtgctaggtgcccgatcaatcatcgaggtttacccttgatgcttctgaaggtgtacatgtgcatctctccgtggaacctattctagttcagacaattgaactaaatacataacatgttggttataaacatgtttatgttagtcttttgatttcctttcgttcatgagtcagtagccttgaggcgtgtgcatgttcacactgaggccatcgttttttcgtttttctgttgtcgtatgagctacagtatgtgctctgtgggatggtacaacttatgtacgtcgtggcttgagtcttgggcatattggtagcccgtgatttccatttttattttcatcacaataagaggaagagaaaactgaaaagctgcaatgcagttcgcagcgcc

SEQ ID NO: 153 - protein, 366 aa, Oryza sativa
MAQRVQEEDEQMMSTDDLIQAQIKLYHHCFAFIKSTALWAAIDLRIADVIHRNGGAATLSDLALNVGLHPTKLSHLRRLMRVLTVTGIFAVEDRNGEAMYTLTRVSRLLLNSDGEGTHALSQMARVLANPLAVISHFSIHEWFTTEKATTMTPFEVAHGCTRWEMIANDAKDGSVFNAGMVEDSRVAMDIILKESCGIFQGISSLIDVGGGHGAAAAAIATAFPNIKCTVLDLPHIVAEAPATHSNIQFIGGDLFKFIPAADVVLLKCLLHCWQDDDCVKILRLCKEAIPARDAGGKVIIIEVVVGIGSEEIVPKEMQLLFDVFMMYIDGIEREEYEWKKIFLEAGFSDYKITPVLGARSIIEVYP

SEQ ID NO: 154 - DNA, 3667 bp, Oryza sativa
agtcttatgatctccccggttcctcgaataatgagcaatgtgcaacgcctagctaagttcctattcccgaccacccagttattccgctcgagacaacaacaatggcgacattctgcaaggtacggaaaagagatgatggtatctacgtcctgacgctggccagcagcgacggccaccactatctgaccaccgaagccatcacccagctcaagcaagccctcgagagaatccgcagcaccaaggcgagaggcctggtgacgaccaccacgtcgggctccttctgcgacggcatcaacgccgtgtcggatgacgacgacgacgagccgctttcttcgttggagcgtggcatggccgaggtggtgcgcctgctgctggacctgccgatgccgaccgccgccgccgtccgcggcgacgccaggtggctgggcttcgtcctggcgctggcgcacgaccacctgttcgtgcatacggaggccgtgctgggattggccgccgctgccgacacgacggccaagccccgacggcgcccgctgccggactacgtcgtggcgctcctccgggagaagataccgtacgcgcagctgcggaagctgctcttgctcaaggcgcacgtgttcaccggcgaggagctcaaggggaactggcactcggtgcacgaggcgatccccaatcgggatcatgtggttgctgttgctgtgcagaacctccaaagcgtggttgtgggagacgggatggactacgccaaggtgaggcggaccatgtacaccaacagctgcgtggctgttgcggtgacgacgacgacgacgaccatgctgcctttcgatggatcatccaggtatatatcatagatattgatgatgattacataaaaaatagtactctttttttttctgagaaacatttttttgagcaaggatgattccattaaagttaactagaatatcttgaacatctgttaatcaacgtaacaaagcagcgtagccaacggtgtgacgataagcagtgaaatgacgccttcgggggaatccttcaactcaaggtatgcacccatgtatcaatttcaagtttaaaagctctctcacgattgaacaaaccatgcaaaaatcggtctttaatttaattttcctaaaaacgtacttctctcacccaaaatagtacttatatataataattaaaatttgtactaaaatgtaagcgctttactattcagtatactacctaaataaatcactacctactcatttagagtacctcgacacattcaaacttcttgacgtctgaccctcgacatctactgtttaacgaattgagttctatgatctttgacaatgagaagcatttgttaaacaatttatacgtgaacgcaaataaccgatgcacttattttaccattagttttgaaactatatatttctaaaactgttaaaataaggccccatcgtttcgcttgttcgggaaatgagcccaacaacatatctgcaaacgaaaataataaaaataaatctactaaaataataaaaataaaaacaataaaattttgtacatatctggaaactaaaataataatatttgtgaataaaacatttatacaagtattctttacgatttaaaaataaaggctgaaaaataaacttcaacaaaaaaaaccccaaaatcagctccaaatttcaagatgaaaattcaaattttggctgataagtataagcataaacaataaaaaaaagataaggctgtttagttttatgacaataaatctactattatatttttacattttatatcatgatcctctgacacaaaataattgacctaccattttaggacatactatttttaatagcttttgaatatataagtctttagtccatataaaaaatataaggcatatcttgtttcataaggataagtctttaaccaactattattattattattattttattttttttgtgatgcaaaattaatgttattatactttgttatacaaatgaaatgataagtgaagcaattggtggacataaaacgacttatttactttaaaatagagggaacagagggagtacgtctttactcactagttcttaaggacaaaaatgaatcaatgtgctagatctcctctaaaatcaatagaaaagcacaatacaatttgtactctcagttttgatcattgaattaattggccaggtctattccccgtcttaattaccattaattattagaacttcaatttctcttgcatgacttgcaaagctataattcaagtactacaccagtggatataagtctagctgccatagaagcctgtaccgatggattttcggaatcaaaaaaagttgggagtggtgcgtatggaaaggtttacaaggtatatcccttatgctttggactgttttctcaagtgatactagtagctagcaccagtaatagcgggaagtaactttgtatgatgtattaattacataagccaaatataatagggagtttacaacgaggaggaacttgcattcaagaagattgatggcttggccgtgcttaacgaggatcaattcaagaatgaacttaaacacctaatgagtgtccagcatagaaatatcgttcggtttgttggttactgttctcaaataaaagaaaaattcatctggcgaggaaaggaatacgttagtgttcaatatataacaagaattctgtgctttgagtatttgccaggtggaagccttgacaagcatctggatagtaagttcctacatacaattccggacatattttctgttgcgaaaatgagataattttcgtaagttctctcttttctctacattgcagaagaatctgaatctgatggatttgactggcgcacacgatacaatataatcaaggtgatttcccaaggattaaattacctccatgaattggaaaaacctattttccacttagacctgaaacctgccaatgtattgcttgatgagaacatggagccaaaaattgcagactttgggatatcaaagcatttcactggaactaaaactcacataacaatatcaaaacctacaggcacaccgtaagcgaaatctcctcttgcacctaatttattttaccctgcagttaataaatttgtgactttcttatataaactggtcatgaccttaacttccattggccccgtgcagtcgttacatgccgcctgagtatttgaataaactcgtgatctcaaataagtatgatgtattcagttttggagttatggtcatggaaatcattgctgggcctactggttatgacaacttcagtgaagcgaatgatcaagacagttttaaatatattgatcgtgtgtataagcaatgggaaaagaggataacagcaaagtcgcacgatccatctgcagaaataaatcaagtgaaaagatgcatcaatattgcggtgaagtgtttaaatcagaacagagatgataggcccgaaataaaggctatcgtgggcgaactaaattaagctgaaagtgtgcttcctacctataattgacacatcaatcgagccagaagaaatcggcgcatgcaccgcctcccatatatagaagttgtgtgttcaactagagatactcgttatgtatttgatgagagttgttgtaacattttaaactaaaagaatttattttttctcttgtatgaattgtttt

SEQ ID NO: 155 - protein, 74 aa, Oryza sativa
LLELQFLLHDLQSYNSSTTPVDISLAAIEACTDGFSESKKVGSGAYGKVYKVYPLCFGLFSQVILVASTSNSGK

SEQ ID NO: 156 - DNA, 4593 bp, Oryza sativa
atggccggactgtttgccactcttgccatcaggaaggcactggacaagctctcctccatcctgccagcaagaagcctattggcatcctcctcgtcggcagctgctatggtgaggcaagggcaggagcaagatctggaggacctccggatgctggagcggacgatgcacaggattcacgcgactctgaaggacgcggagcagcactgggacatccgtgatgaaagcgccaagctgcggctcaaggagctcaaggagctagcgtatgacgcggaggacgtggtggacgagtacgagtacgaggtgaaccgttgcaaggctgaggctctccagctatctgcaagcgtggccagccacaagcaagagctggctcttaaagcaaggaaacttattaagagattccatgaaatccaatattattctgataattttactttatcggagaatgatggagagagacggtttgctcctaatattggtactctacccaagactagctctgttatatatgcaccgaaaattattggaagagagcaagacaaggacaacattgtagaaaagttgttgtccatgacgagtgacagtgtagctactccagtttctatcttggctattgtcgagcaatttgatcctacttacataacaaagagcatcataagttcattagagaaggataattgtggtctatcggaagtttgtagtcctcatgagacattggcaaaacgaataaagcacaagatggttttacttgtgctggatgatgtatggaatgaacgaagagattgctgggatctgttgtgcgaaccgatgaacacagcaaagttatgtatgattatagtaacaacccgtagtgagagagtggcaaagcttgtgcagacaatgcctaatttctacagcctaaactgcctaagttctgaagagagctggtcattgtttaagcaagttgcttttactgttgacaatggaaacactccaaaccttcaagagatcggaatgtctattgttaaaaagtgtaagggcttacctttagcaattaagacactagccagcatgttgtgctatgaaacatgtgaacagagatggaaagatgtcatagaaagcgagttgtgggacttggagcaaccaaggaatgaggttttgccatccttggagttgagctacaagaacatgcctatatacctaaaacgatgttttgttgccatctctctatatccaaaagactatatattcgatagaaaccaggtgcttcaattgtggaaagtactagacctccttcaaagtgacagacataataatgagactgaaattggaaatagatatctcgatgaattggttgagcggtcatttcttctatttcttctaacaaaggttgatggacattactacaagaaatacttaatgcatgatcttattcacgatcttgcatgctttctttctgcagatgagttctttagacttgatgatagcagtacatccattgaaattccacaaaatgctcggtacatatctatccaaaatttggcatccagtgagatttcaatcacaccacttgctttgagggccatcatagtgttgcctagagcagaagtgaacattaataattcagaagcattattttctaagtgtgaaaagttacgagccctcgtgttaggtgaaggctgtctggatcaaaacttacctgccttaatgggaaggttgaaattactacgccatttgaaacttgtcacaagcttctttagtcactctgatccatgctgggaccacgttgatggactacgtggaattgggcacctaaataacatgcttactttgcctccaattcatctgagaaatgatcgaataatagagctaaggagcttgaacaagctaagggagttgagaataggtgggttgggactgcacttgactatcgatggagcaaaggatgctaggctacagagcaaaaggcacctacaattactaagcttggattttggagattgctgtccagatcacaaccaacaagtgcagctacttgagagcctgcgaccacatcgcaacctcggagaattgataataatgaactacgagggtctgaagtatccctattggttgggcgatgcttccttttccaacttgtctcaaatagaactcggttattctcacattcagtaccttccaacgctcggtgatcttccgtccctcgtgtccctccatatccatgacatgatgattgtcgagcgaattggctgggagttttgcagccattttcatggtgttaagggattcccatcattgacacagttgagattcaattggatgcataagtggtcagaatggtctggaattgttgacggtggatttccacgcctgcgcactctttcgatctgccatgcccacagtctaaggcttgataacattgaatcatttccgttcagatccttgataactctcgaactggacaaatgctgctgcatcacaaccattcctgcatcgacttcactacgcacgctgcgcattgatcggcggagctttgacttgcgcagaagctcaactgatggtccgcggctgaatcgcctcccgtccttggagtgtttaacagtcatctgccatgacaccacaagcatccttcttcagccacagcacctgccttcactcaagaagctcaacttgagctgcgaaaaactgcagtactgcgatggactttcaggcctcacttccctctcggtgctcaagccttggggatgcccaaagctcccaattcatagtttgatcccacagctgcagctacagactctggatgttcgttgctcaccaggaatcgagtgggctgccaatgggcctgtacaaccattcattcaagctggcccaagcaaacccaagccgctgatccatgggatttcaagcatggaggcaatggggaagtaccgctgcggcgtcccgtgcagttggtcattggatttgggcaaggctactgctcatggcaccaacgcccacaacctgttcggtgaaatgtcaagccaaggagaggtgtcccaagaagatctcaagatatctaaggccgtccccatcaattcccccatgaacaaagaggagaaaatgatggatgaagctctggatcagatattggagaagcttgaacaaatgaagaccaagcgtaggtgcaatgagaagattgatcagattttggagaagtttgacgagatagaagctaataggcgcaaatcattcgaggagacaactaacatcatcaaggcgacaacctccatcttcaattctgcatcatcttcaacacccccgacctcgcctactccagtgctcgccaagtgttcgtgggcgtgttccaacagtgccagtgcgtacacgacaacaagtgcaagccacaacatcgatgttcctactccgacagtcgccatgggcttgcaggtgagtttgaaccatggcattggtactacaacagtgacgcccaccaagtgcttggtaaattgcttcgacaatgacaccggtgtgaatcatgccattcttgaggagtcgtttgctagtaccactgctgcagccaccatggagacagtggttagcgaggacaaggcctgctctattttcatcaatactactgacctcaccaaggttatgcattcaaggtgtacgacaatcagcctcaaagacaacatcggtactattcaggccgaggttgcattcccctttccgtttcacacactgaacatgattgcagcaccaaaggagcccatgctagtcatggcagaaaagctggattccattttctgcataaaattggtgatgcccaacgggtgtttgatgaaatgcctcaaaagtgacaagaggctgctggcggggcttcccaagagaaaaccttggccacttccttggtcaggtggtgtgacaagtgtatgtctaataccaccatggccaccgccaattagacttaagcaatgcaggtcctggaaaattggagtggcaattagtctgtttgcttggaaggcacagtgggattttgttagttacaggagctgcaccgttgttgaaatttctagaatgcatgagcttgccttgttggtgctattaactcaagacccaagtgatgataaaagagatgacttgctaccggcatccaaaaatccattcacctcctatatgatggcacaatattttgaggttattgaaagcaggcttattagtgatataagccacttggatggcaacaatgttcaggatacttgggactgcaagggaattctagttatactagaagatggtaccagcaaatggagaatgcaagggatcaagccaagtgcaagcaagaatataatttcagcatggaagaatgtttttattccaaccatcagatcagtcttggaaggtgacaagcaattctgcatttacaagccaaatattagcacttatttgctatgtcatgttgctatgccaactattcttggaaggctgaaaacaagaggcacaattgttaagcttgtggtaaaatatgagcactgtgaagaaggcatactaagctggagtggaatattgtcattactcattacaaggaagggcaatagtgatgggaatgacctgatcattttgattatccaagagctataa

SEQ ID NO: 157 - protein, 1531 aa, Oryza sativa
MAGLFATLAIRKALDKLSSILPARSLLASSSSAAAMVRQGQEQDLEDLRMLERTMHRIHATLKDAEQHWDIRDESAKLRLKELKELAYDAEDVVDEYEYEVNRCKAEALQLSASVASHKQELALKARKLIKRFHEIQYYSDNFTLSENDGERRFAPNIGTLPKTSSVIYAPKIIGREQDKDNIVEKLLSMTSDSVATPVSILAIVEQFDPTYITKSIISSLEKDNCGLSEVCSPHETLAKRIKHKMVLLVLDDVWNERRDCWDLLCEPMNTAKLCMIIVTTRSERVAKLVQTMPNFYSLNCLSSEESWSLFKQVAFTVDNGNTPNLQEIGMSIVKKCKGLPLAIKTLASMLCYETCEQRWKDVIESELWDLEQPRNEVLPSLELSYKNMPIYLKRCFVAISLYPKDYIFDRNQVLQLWKVLDLLQSDRHNNETEIGNRYLDELVERSFLLFLLTKVDGHYYKKYLMHDLIHDLACFLSADEFFRLDDSSTSIEIPQNARYISIQNLASSEISITPLALRAIIVLPRAEVNINNSEALFSKCEKLRALVLGEGCLDQNLPALMGRLKLLRHLKLVTSFFSHSDPCWDHVDGLRGIGHLNNMLTLPPIHLRNDRIIELRSLNKLRELRIGGLGLHLTIDGAKDARLQSKRHLQLLSLDFGDCCPDHNQQVQLLESLRPHRNLGELIIMNYEGLKYPYWLGDASFSNLSQIELGYSHIQYLPTLGDLPSLVSLHIHDMMIVERIGWEFCSHFHGVKGFPSLTQLRFNWMHKWSEWSGIVDGGFPRLRTLSICHAHSLRLDNIESFPFRSLITLELDKCCCITTIPASTSLRTLRIDRRSFDLRRSSTDGPRLNRLPSLECLTVICHDTTSILLQPQHLPSLKKLNLSCEKLQYCDGLSGLTSLSVLKPWGCPKLPIHSLIPQLQLQTLDVRCSPGIEWAANGPVQPFIQAGPSKPKPLIHGISSMEAMGKYRCGVPCSWSLDLGKATAHGTNAHNLFGEMSSQGEVSQEDLKISKAVPINSPMNKEEKMMDEALDQILEKLEQMKTKRRCNEKIDQILEKFDEIEANRRKSFEETTNIIKATTSIFNSASSSTPPTSPTPVLAKCSWACSNSASAYTTTSASHNIDVPTPTVAMGLQVSLNHGIGTTTVTPTKCLVNCFDNDTGVNHAILEESFASTTAAATMETVVSEDKACSIFINTTDLTKVMHSRCTTISLKDNIGTIQAEVAFPFPFHTLNMIAAPKEPMLVMAEKLDSIFCIKLVMPNGCLMKCLKSDKRLLAGLPKRKPWPLPWSGGVTSVCLIPPWPPPIRLKQCRSWKIGVAISLFAWKAQWDFVSYRSCTVVEISRMHELALLVLLTQDPSDDKRDDLLPASKNPFTSYMMAQYFEVIESRLISDISHLDGNNVQDTWDCKGILVILEDGTSKWRMQGIKPSASKNIISAWKNVFIPTIRSVLEGDKQFCIYKPNISTYLLCHVAMPTILGRLKTRGTIVKLVVKYEHCEEGILSWSGILSLLITRKGNSDGNDLIILIIQELZ

SEQ ID NO: 158 - DNA, 2022 bp, Oryza sativa
gattaacgggtcatctcctgccttccccattggtccgaacagctaccgctagcacacaaaagtacagaattccaaaccaaatcctgtaccaaaacaggaagggcgcaggcatgcctcttcttatcgtgcagcccgtacccatttcgacaggtcctattgcctgcgctagcaccgcgcgtcctgcagcagcggcgcacgatgacgacggccaccttttcgacgatctcgtgctcggctacggcggcgacgacaagacgagcgccgacgccgacgatccagcgaggaagctcgagtggctcaggtcgcaggtcatcggcgcggacgcggagttcgcgtcgccgttcgggacccgccgcgtcacgtacgccgatcacaccgcgtccggccgctgcctgcgtttcgtcgaggacttcgtgcagcgcaacgttcttccctactacgggaacacgcatacggtggacagctacgtgggcttgcacacgagcaagctggcgtcggaggcggcgaagtacgtgaagcgcagcctgggagccggggcggaggacgtgctgctcttctgcggcacgggctgcaccgcggccatcaagcggctccaggaggtgacgggcatggccgtgccaccgacgctgcgctccgtggcgctggacgtcctgccgccgtcggagcggtgggtcgtcttcgtggggccgtacgagcaccactccaacctgctcacgtggcgggagagcctcgcggaggtggtggagatcgggctgcgcccggacgacggccaccttgacctcgacgccctggaggcggcgctggcggcgccggagcgcgccggtcggcccatgctgggatccttctcggcgtgcagcaacgtcaccggcatccgcaccgacacgcgcgccgtggcgcgcctgctgcacggctacggcgcgtacgcctgcttcgacttcgcgtgcagcgcgccctacgtcggcatcgacatgcggtccggcgaggaggacgggtacgacgccgtctacctgagcccgcacaagttcctggggggaccgggaagccccggcgtcctggcgatggcgaagcggctctatcgcctccgccgcaccgcgccgtccaccagcggcgggggcaccgtcgtctacgtcagcgcatacggcgacacggtgtactgcgaggacacggaggagcgcgaggacgccggcacgccggcgatcatacagaaggtccgggccgcgctggcgttccgggtgaaggagtgggtcggcgaggcgtgcatcgaggcgcgcgaggaccacatgctcgcccttgctctccgccggatgcaagcgtctccaaacctgcggctgctgctcggcggcgaccggcccagcggagggcgctgtctccccgttctctccttcgtggtgtactcaccgcgcgacggctccgagcaggatgagcggccgcagctgcactgccggttcgtgacgaagctgctcaacgacctgttcggcgtgcaggcgcgcgggggatgctcctgcgcggggccctacggccaccgcctcctcggcatcacgccggcgcgagccaaggccatcaaatccgccgtcgagaagggctaccacggcgtgcgccccgggtggacgcgcgtcggcctggcctactacacgtcgacgcgggaggcggagttcgtgctggacgccatcgacttcgtcgccagtttcggccaccggtttctgccgctctacgctttcgactgggaaaccggggactgggagtacaaccacagcttcggtcgtgtcctggcaaacaacaacgccatcagcaatgctgccgctgctgcttctagtggacgggtcaaagcagaggacgagtaccggagctacatggcatttgcacggagcctagccgactccttgggcggatgtctggataacactcctgctagacacgttcccaagggcatcgacccacagttgctttacttccctatgtgagatcggatagttggattctttgttgttgaattttacccttggtttttggccgaaaacctgg

SEQ ID NO: 159 - protein, 616 aa, Oryza sativa
MPLLIVQPVPISTGPIACASTARPAAAAHDDDGHLFDDLVLGYGGDDKTSADADDPARKLEWLRSQVIGADAEFASPFGTRRVTYADHTASGRCLRFVEDFVQRNVLPYYGNTHTVDSYVGLHTSKLASEAAKYVKRSLGAGAEDVLLFCGTGCTAAIKRLQEVTGMAVPPTLRSVALDVLPPSERWVVFVGPYEHHSNLLTWRESLAEVVEIGLRPDDGHLDLDALEAALAAPERAGRPMLGSFSACSNVTGIRTDTRAVARLLHGYGAYACFDFACSAPYVGIDMRSGEEDGYDAVYLSPHKFLGGPGSPGVLAMAKRLYRLRRTAPSTSGGGTVVYVSAYGDTVYCEDTEEREDAGTPAIIQKVRAALAFRVKEWVGEACIEAREDHMLALALRRMQASPNLRLLLGGDRPSGGRCLPVLSFVVYSPRDGSEQDERPQLHCRFVTKLLNDLFGVQARGGCSCAGPYGHRLLGITPARAKAIKSAVEKGYHGVRPGWTRVGLAYYTSTREAEFVLDAIDFVASFGHRFLPLYAFDWETGDWEYNHSFGRVLANNNAISNAAAAASSGRVKAEDEYRSYMAFARSLADSLGGCLDNTPARHVPKGIDPQLLYFPM

SEQ ID NO: 160 - DNA, 876 bp, Oryza sativa
atggggaggttgagcttgcttctcgtggttttcacggcggcggcggcggtggttgggctcgccggagccagcttccgcgacgagtgtgacatcccgtgggagccccagaacgccaggttcaccgacgacggcaatggcctctcgctctccctcgtcagcaactactcaggctgcatgctgcggacaaagaagcagttcatcttcgggagcgtctccactcttatccaacttgtccccggcaattcggccggcaccgtcaccacatactacacatcgtcggtcggagacaaccacgacgagatcgactttgagttcttaggcaacgagaccggccaaccctacaccatccacaccaacatctatgccaatggcgtcggcgacaaggagatgcagttcaagccgtggttcaaccccaccgatggctaccacaactacaccgtctcctggaccgcttgcatgattgtgtggtacatcgacgggacacccatccgagtgttccgcaactatgaaaaaagcaacggtgtggcgttcccaatgaagcggccgatgtatgggtactcgagcatatgggcggcggaggattgggcaacacagggtggccgtgtgaaggctgactggtccaaggcaccttttgtcgcgaactaccatggcctcaacatcaatgtatgcgagtgctctactacctctggtggaggcaacagttgtgctgcaaaatgtgcttcaacctataatagcaagtcatcagtatgccagttgagtgattcagagctcgcacggatgcggaaagtgcaggatgagtataggatctacaactattgcgttgatcccaagagatacaacggatctgtaccagtcgagtgtagcctaccacaatag

SEQ ID NO: 161 - protein, 291 aa, Oryza sativa
MGRLSLLLVVFTAAAAVVGLAGASFRDECDIPWEPQNARFTDDGNGLSLSLVSNYSGCMLRTKKQFIFGSVSTLIQLVPGNSAGTVTTYYTSSVGDNHDEIDFEFLGNETGQPYTIHTNIYANGVGDKEMQFKPWFNPTDGYHNYTVSWTACMIVWYIDGTPIRVFRNYEKSNGVAFPMKRPMYGYSSIWAAEDWATQGGRVKADWSKAPFVANYHGLNINVCECSTTSGGGNSCAAKCASTYNSKSSVCQLSDSELARMRKVQDEYRIYNYCVDPKRYNGSVPVECSLPQ

SEQ ID NO: 162 - DNA, 1428 bp, Oryza sativa
acaccaacatacggagttcgagtgacatacgagcagcagccaacacaagctcgatcgaaagttctctcacaagttcagagtagcatttggttagtgacagtaactggtcagcgtctctcaccatgtcgtccaattttgaggccaacaacaacaacaatggcgagaagcagctggtctgtgtgaccggagcaggtggcttcattgggtcgtgggtggtgaaggagctcctcatccgtggctaccacgtcaggggaacagccagggatcctgctgacagcaagaatgctcacctgcttgagctggagggagccgacgagaggctctccctctgccgcgccgacgtcctcgacgccgccagcctccgcgccgccttcagcgggtgccacggcgtcttccatgtcgcctccccggtgtctaacgaccctgaccttgttccggttgcagtggaggggacgaggaacgtgatcaacgcagcggcggacatgggcgtgcgccgcgtggtgttcacgtcgtcgtacggcgccgtgcacatgaaccccaaccggagccccgacgccgtcctcgacgagacctgctggagcgactacgaattctgcaagcaaacagacaacctgtactgctgcgccaagatgatggcggagatgacggcgacggaggaggcggcgaagagggggctggagctggcggtggtggtgccgtcgatgacgatgggtcccatgcttcagcagacgctcaacttcagcaccaaccacgtcgcccgctacctcatgggcaccaagaagtcctaccccaacgccgtcgcggcctacgtcgacgtccgcgacgtcgcccgcgcacacgtcctcgtctacgagcgccccgaggcacgcggccgctacctctgcatcggcaccgtgctccaccgcgccgagctcctccggatgctcagggagctcttcccacggtaccctgccactgcaaagtgtgaggatgatgggaagccgatggcgaagccgtataagttctcgaaccagaggctcaaggatttgggtttggagttcactccactgaggaagagtttgaatgaggcggtcctatgcatgcagcagaagggtcacctgcctctgatttatcccgttccaaaacgtgcttacctataaaatcaagataaaaatacgaattcgtctgttgcgatgggaaacagagagcaacagggaaaaaacaaaggaaaaaaaaggaaacacaagggctctgagattgtttatttgtgcaagtgtagtaggcatttatattttgttcttacacatgtaaagcccttctgtaatgaacaataaggtcccatggagggaacggcaaatgcaaatatggccttcatttgtattctgggcttcaggatgtaaatttgaatatcattgtatttattttctatgttgcagggaatttccgagt

SEQ ID NO: 163 - protein, 338 aa, Oryza sativa
MSSNFEANNNNNGEKQLVCVTGAGGFIGSWVVKELLIRGYHVRGTARDPADSKNAHLLELEGADERLSLCRADVLDAASLRAAFSGCHGVFHVASPVSNDPDLVPVAVEGTRNVINAAADMGVRRVVFTSSYGAVHMNPNRSPDAVLDETCWSDYEFCKQTDNLYCCAKMMAEMTATEEAAKRGLELAVVVPSMTMGPMLQQTLNFSTNHVARYLMGTKKSYPNAVAAYVDVRDVARAHVLVYERPEARGRYLCIGTVLHRAELLRMLRELFPRYPATAKCEDDGKPMAKPYKFSNQRLKDLGLEFTPLRKSLNEAVLCMQQKGHLPLIYPVPKRAYL

SEQ ID NO: 164 - DNA, 1285 bp, Oryza sativa
ggcgtgccaagttgtgtgtgtgtaccgcggcatggcggaccagctcatctccacggcagaccacgacacgctgccgggcaactacgtgcgccccgaggcgcagcgcccgcgcctcgccgacgtgctctccgacgcctccatccccgtcgtcgacctcgccaaccccgaccgcgccaagctcgtctcccaggtcggcgccgcctgccgctcccacggcttcttccaggtgctcaaccatggggtgccagtggagctgacactgtcggtgctggcggtggcgcacgacttcttccggctgccggcggaggagaaggccaagctctactccgacgacccggccaagaagatccgcctctccaccagcttcaacgtccgcaaggagaccgtgcacaactggcgcgactacctccgcctccactgctacccgcttcaccgctacctccctgattggccatccaaccccccttccttcagggagatcataagcacatactgcaaagaagttcgggagctcggattcagactgtacggagcgatatccgagagcctgggcttggaacaggactacatcaagaaggttcttggtgagcaggagcagcatatggcggtgaacttctaccccaagtgcccggagccagagctgacgttcggactgccggcgcacaccgacccgaacgccctcaccatcctcctcatggaccagcaggtggccggcctgcaagttctcaaggaaggcaggtggatcgccgtgaatccacagcccaacgcgctggtgatcaacattggtgatcagctacaggcgctaaccaacggaagatacaagagcgtgtggcaccgtgctgtcgtcaactctgacaaagcgaggatgtccgtcgcatcgttcctgtgcccctgcaacgacgtgctcatcggcccagctcagaagctcatcaccgatggctccccggccgtctaccggaactacacctacgacgagtactacaagaagttctggagcagaaacctcgaccaagaacactgcttggagctcttcagaacaacacctacagacacatcttgaattcttgatctagtcgagaactggtttgtagtactcggttgtaggtgtaggtggtgtttgggagagggggtggtgtttgggagagagcccgacttattgttttgtgagaggatctcccaaacacccccgtagtttctcggttgaagttgtttgtagtactcggttgtaggtgtactggaacgagccgttggaatgagtaatcaatcaaatcaatcggtgcaacgc

SEQ ID NO: 165 - protein, 342 aa, Oryza sativa
MADQLISTADHDTLPGNYVRPEAQRPRLADVLSDASIPVVDLANPDRAKLVSQVGAACRSHGFFQVLNHGVPVELTLSVLAVAHDFFRLPAEEKAKLYSDDPAKKIRLSTSFNVRKETVHNWRDYLRLHCYPLHRYLPDWPSNPPSFREIISTYCKEVRELGFRLYGAISESLGLEQDYIKKVLGEQEQHMAVNFYPKCPEPELTFGLPAHTDPNALTILLMDQQVAGLQVLKEGRWIAVNPQPNALVINIGDQLQALTNGRYKSVWHRAVVNSDKARMSVASFLCPCNDVLIGPAQKLITDGSPAVYRNYTYDEYYKKFWSRNLDQEHCLELFRTTPTDTS

SEQ ID NO: 166 - DNA, 1853 bp, Oryza sativa
gatgcttgtgctgttgtgcacatgcagtagctgaaatgtgggcgcgcttctggtattccaagccggccgagagggcgcggccggcggcgttcgtgcccccgccgccaccgccgacgccgcctcagtacgtgcctcccgaagagccgtcggccttcgcgaagctctacgccgtcgctggcgacgtggtcggccgcgccaaggctctcctgaccaccggtggacctgtcacgccctccgacgacgggcagagagtccgccgtgccttggcccagctcacggccccgccttccgacccggcgcccgcggcaccgcagaaggactcgagctcgggcttgagctctacggcggtggtctggatcatagtggcggccggcgtcgtcggggcggttttggctctgtgcgtgctcacgctttggatccgtcgatgccggcggcagcgcaggcggcggcggcaggcccagccttttccgctaccaccgccaatatacaaccccaacccctactacaaaggtgaccttccgccgcagccattcgttgcgcagcaaccgccgtcggaccactacttcattcagcaccagcacccgacgccgccgcagaccagcggcacgttctccgacgccggctccgagcgcccgcactccatcgacatcctcaccgagctgcccaccggcggctcgctctcgtacgaccagctggccgccgcgacggacgggttctctcccgacaacgtcatcgggcagggcggcttcgggtgcgtgtacagggggacgctgcaggatggcaccgaggtggcgatcaagaagctcaagacggagagcaagcagggcgaccgcgagttccgcgccgaggtggagatcatcactcgcgtgcaccacaggaacctcgtctcgctcgtggggttctgcatctccggcaacgagaggctgctggtttacgagtttgtccccaacaagacgctcgacacgcatttacacgggaacaaggggccacctctggattggcagcaaagatggaaaatcgctgtggggtctgcaaggggtttggcctatctacacgatgactgttctcctaaaattatacatcgtgatgtcaaggcatccaatattctgctggatcatgattttgagcccaaggttgcagattttggtctagcaaagtatcaaccaggaaaccacactcacgtttccacaagaataatgggcacatttgggtacatagctccagagtttttgtctagcgggaaacttactgacaaagccgatgtctttgcttttggtgtcgtcctcttggaactgataactggaaggctgccggttcagtcatctgagtcttacatggatagcacgttagttgcttgggcgaaacccttgctttccgaagctacggaggaaggcaactttgatatccttgttgatccagatattggagatgattatgatgaaaacataatgatgcgaatgatcgagtgtgccgccgctgccgtgcgccaatcagcacatctgcgtccatccatggttcagatcctgaagcacttgcaaggagaaacgcacggagaagatctaaactctatatttaggataacgtacgcagaagatacatacagttccatcatggaatccggtgagtccatcgggccacgatcacgaagggcgccgcggagtcagagaaacactagcagcgattacagcagtgaacaagctcttacagacaaagccaaccgaagccccgctaagggcaggtgaactgaagatatattgtttaggtagtactatttcttttttttttttttttgagattgaacaaatgttgctggtcaagaggacatgaatggaatggttgtgttgtgcatttag

SEQ ID NO: 167 - protein, 568 aa, Oryza sativa
MWARFWYSKPAERARPAAFVPPPPPPTPPQYVPPEEPSAFAKLYAVAGDVVGRAKALLTTGGPVTPSDDGQRVRRALAQLTAPPSDPAPAAPQKDSSSGLSSTAVVWIIVAAGVVGAVLALCVLTLWIRRCRRQRRRRRQAQPFPLPPPIYNPNPYYKGDLPPQPFVAQQPPSDHYFIQHQHPTPPQTSGTFSDAGSERPHSIDILTELPTGGSLSYDQLAAATDGFSPDNVIGQGGFGCVYRGTLQDGTEVAIKKLKTESKQGDREFRAEVEIITRVHHRNLVSLVGFCISGNERLLVYEFVPNKTLDTHLHGNKGPPLDWQQRWKIAVGSARGLAYLHDDCSPKIIHRDVKASNILLDHDFEPKVADFGLAKYQPGNHTHVSTRIMGTFGYIAPEFLSSGKLTDKADVFAFGVVLLELITGRLPVQSSESYMDSTLVAWAKPLLSEATEEGNFDILVDPDIGDDYDENIMMRMIECAAAAVRQSAHLRPSMVQILKHLQGETHGEDLNSIFRITYAEDTYSSIMESGESIGPRSRRAPRSQRNTSSDYSSEQALTDKANRSPAKGR

SEQ ID NO: 168 - DNA, 1483 bp, Oryza sativa
attttgcacggtatatatcccagtctgtgtgtgagtgtgtgtggtctgtggagtgtatggttgatttggttggtaattggctaagctagctatagcatggcgttctcgtcggagggcggcgtgccggcggagagggtggcggcggcggtgaacgacctggtggaggtgcgcgacggattggtgaggctgaggggcttcttgccgccgccgccgcaggccgagcaatcgtcgtcgcggccgccgtgcgcggcggagctgatggacgcgacgatgagcaagctgatgagcgcgatggccacgttgggcggcagcggcgacatcgccggggaggtggacgctcctctaacaagagagtcgccgcaacactagaagacggtcacgtgtggcggaaatatgggcagaaagatatccaaaactcaccttatccaaggagctactacaggtgcacgcacaagctagaccaaggctgcggtgccaggaggcaaacccagcgctgcgaggccgacccgtcgaattacgacatcacctactacggcgagcacacctgcagggacccttccacgattatcccgacggccatcgccaacgccgccggcgcggcgagcgacgggccaaacaacaacatcatcagcttcgccacaggcggcgtcgttgttgctaattcgtctcggctggcgagggaagggacgacggcgacgacgacgagcgcggccacgcagctgtcctcctcgtggggcacgagcggcggtggcggcggcggcgacgacgtgttcagctcgtcgggggagcggttcatgcagtgggacgagctcgcggcggccgtcgggcacgtgagctcggtgggggtgacgtcgtcgacggtgggctccgcgccggcggcggagaacgacggcggaaacggtgacacggctgcgggaggaggaggagacggcggcggcgcgggcagcttcccgtcgtctccgagcgccggcagcctcggttttgtggtcggcccgctcgggagcatcgaggacgtcgatgacttcttcccgttcgatccctgagatgagatcggcgccgtcgattgaaccagcagtttgcagcggacggatttacacaacgttcgtagtatactaccagtacatagtagcaaacgcatcaaggctttagtattaagttgcataatggcatctctgtggaaatcaaataagcaaatatagaaccatctagtacattaagtaggttgcttatctacagactagactacagtgactcacacagcttctagctgtgcaagttggttaaggtgatgttttagattgaaatccaagccacgcatgttgatgagccggaattgggctcactaaaatgtggcttaagtttttgtttttttgtttggattgcttgttggcggcccaatggtaaacggtcactcttttcttctcagtttgcaagcctagcccactataccgacaaggaaaaacccatgtaatctgctaggctc

SEQ ID NO: 169 - protein, 90 aa, Oryza sativa
MAFSSEGGVPAERVAAAVNDLVEVRDGLVRLRGFLPPPPQAEQSSSRPPCAAELMDATMSKLMSAMATLGGSGDIAGEVDAPLTRESPQH

SEQ ID NO: 170 - DNA, 1097 bp, Oryza sativa
atcatccatccatctccctgcagctacgtactgtacttgttagcaatcaatcccatcaaatcatccaccgctcgctgctgctgctacgtactatacagcttgattaattaggttttacgacgacggcaacggggacagatatgacggccgccctgcaagcgctgctcgacccgacggcgctgtccttgggcctgcccacgccggcgatcaacaaggaggagtacctcgccatctgcctcgccgcgctcgcctgcacgcgggcggggaaggccctggtgggagtgggaggccagcagcaggtgcaggcctgcaataagtggctgtgcccagcgcccgcggcgcctgaggagctccgcttccggtgcaccgtctgcgggaaggccttcgcctcgtaccaggcgctcggcggacacaagtccagccaccggaagccgccttccccgggagaccactacggcgccgccgccgcggcgcagcagctggcatccgctggtgactcgaaggaggactcggcgtcgtcagcggccgggagcactggcccgcaccggtgcaccatctgcaggaggagcttcgcgacggggcaggcgctcggcggccacaagcgctgccactactgggacggcacgtcggtgtccgtctccgtctcggcgtccgcgtcggccgcctcgtcggccgtcaggaacttcgacctcaacctgatgccgctgccggagagcacagccgccgccgggatcaagaggtgggcggaggaggaggaggtgcagagtccactgccggtcaagaagctcaggatgtccaactaattcatcatacgccatcttgtaaaaacaagagatctgcccattgatcgactctattgaacagagtctattctttgattttttttttcttttcaactcactaattgtttggtttctgtcatcgagtatgcaacaagctaagctggtgaccatggatcttccaagattgattgtcgccaagggacatatatggttctaggagtgttgattcatttgattctttgtatatttgttcaatctaaaaattaatgtactcaatctgctcaatatatatagacgctatattattacgactcc

SEQ ID NO: 171 - protein, 220 aa, Oryza sativa
MTAALQALLDPTALSLGLPTPAINKEEYLAICLAALACTRAGKALVGVGGQQQVQACNKWLCPAPAAPEELRFRCTVCGKAFASYQALGGHKSSHRKPPSPGDHYGAAAAAQQLASAGDSKEDSASSAAGSTGPHRCTICRRSFATGQALGGHKRCHYWDGTSVSVSVSASASAASSAVRNFDLNLMPLPESTAAAGIKRWAEEEEVQSPLPVKKLRMSN

SEQ ID NO: 172 - DNA, 1454 bp, Oryza sativa
tgcttgcgtccttcttcatgtccggcttgggcggcgcgccgccgtccttgctgccgccgtcgtcgtcgtcggccgcctccttcttcttcttgcgcgcgccggtgaggtcgagcgagcagtcgatgtcctcgatgacgatgatggacttgctcgtcgtctcgatgaagagcttgcggaggtcggtgttggagtggacggaggtgagctcgatgtcgtagatgtcgtagtcgaggtagttggccatggcggcgatcatggcggatttgccggtgcccggcgggccgtgcaggaggtagccgcgcttccacgccttcccgacgcgggcgtagtagtccttgccgttcttgaacatgtcgaggtcgtccatgatctccttcttcttggccgggtccatggcgagcgtgtcgaacgtcttggggtgctcgaacacgacgtggctccacgccgaccggacgaggccgtcgacgtcgctccagttgtgcgtggagatgttggtgaagagcttccgctgccggttctgcaccatgacggcgcggccctggcggcggatgctcgggaggtaggtgttgatgacgagctcgcggtggcggtcgaggaagaagaggcggtagtaccggcgattctcctgcgcgcggccgccgccgccccagccgtagtacccgcctccatcggtgcgcggcggcggcgtggagtacgcgcaccaccagacggtgacgtcggtgctgtcgtcggcggcgacgacgtcggagacctcctcgccgtcgaccatgctgaggacgagcttgtcggcgtccttggcgccctcggcgcggaggtggcgcacgtcgcgcgccgacgacgcgctgaggtaggccttgacctcctcgtacgccgcgctccgcttcatcctgccgccctcgtactcgtggatggtgaccgacaggtacgggtcgacgagcgccgccagccgccgcgcgtgccggttcatgtgccgccccaccagcgtctgcagctgcagccgctgcagattctgccacaccaccgtccacagcaccgcgatcaggctcagcaccacgccggagttcagcccgttcaacaacgacgacgacgacgacgtcgcctccatttgtctcaaaaccaaattaatttcccaattcacgaacacgcagaaggattgatcagagatgtgatatgggtggatatggatatggaaagatgtggaggctttggcacttggcgcgccgtggatttataggggcgcggcggcgggcggaatgtgcttggaaagggggtaaggaatggtggtggtgtggtggtcgagtcgtcgttgtcgtcgcatctctcgcatgtgcagctgctgctcaagccgacatgaacgtttttgttctcttgtgatgtggtggtagtggactggatagactagtactccactgttgtttacttttgggcgaaggatcaaatgctaggcgtttctt

SEQ ID NO: 173 - protein, 82 aa, Oryza sativa
MVTDRYGSTSAASRRACRFMCRPTSVCSCSRCRFCHTTVHSTAIRLSTTPEFSPFNNDDDDDVASICLKTKLISQFTNTQKD

SEQ ID NO: 174 - DNA, 1293 bp, Oryza sativa
gatcagagtttgacattgttgcctgcatcactttcacaggtatggtgaggaagctcatcctagctctggccgtgttcttgccggcgctggtgtaccagcagctccagcctccgcctccgaagatctgcggctccccgggtggccctccggttacagggacaagaacacagctcaaggacggtaggcatttggcctacctggagtccggcgtcccaaaggaccaggccaagtacaagatcatctttgttcatggttttgactcgtgcagatacgatgctctcccaatttccccggagctggcgcaagagctgggcatttaccagctgtccttcgatcggccggggtacgccgagagcgacccaaacccggcaagtacagagaagagcatagccctggacgtcgaggagctcgcggacaacctgcagctgggccccaagttctacctcatgggcttctccatgggcggagagatcatgtggagctgcctcaagcacatctcacacaggctcgccggggtggccattcttggccccgtgggcaactactggtggtccggcttgccgtcgaacgtgtcgtggcacgcctggaaccagcagctcccgcaggacaagtgggcggtctgggtctcccaccacctgccgtggctcacctactggtggaactcccagaagctcttccctgcctccagcgtcatcgcctacaacccggccctcctctctgaggaagacaagctcatcatgcccaaattcgccttccgaacctacatgccgcagataaggcagcagggggagtacagctgcctgcaccgcgacatgacggtcggattcgggaagtggagctggagcccgctggagctcgaggacccgttcgccggcggcaaagggaaggtgcacctgtggcacggcgccgaggacctgatcgtgccggtcagcctgtccaggtacctaagcgagaagctgccctgggtcgtctaccacgagctccccaagtccggccacatgttcccgctcgccgacgggatggccgataccatcgtcaagtcgctgctgctcggcgatcagccacctcaggcctgatcctgattcgaactctggtcctccccgttcaccaatgtggagtgcgtttcttggtgcttcgttaagtacatattgctggcattgacagcgtagttaatcggccggtcgtcagtaaaagaaaagcagttcgttgattatactgttgtggttgtatcttcactgaatttttcatccgatatctggatagtttatcaacgtcttgttttcctattggctc

SEQ ID NO: 175 - protein, 344 aa, Oryza sativa
MVRKLILALAVFLPALVYQQLQPPPPKICGSPGGPPVTGTRTQLKDGRHLAYLESGVPKDQAKYKIIFVHGFDSCRYDALPISPELAQELGIYQLSFDRPGYAESDPNPASTEKSIALDVEELADNLQLGPKFYLMGFSMGGEIMWSCLKHISHRLAGVAILGPVGNYWWSGLPSNVSWHAWNQQLPQDKWAVWVSHHLPWLTYWWNSQKLFPASSVIAYNPALLSEEDKLIMPKFAFRTYMPQIRQQGEYSCLHRDMTVGFGKWSWSPLELEDPFAGGKGKVHLWHGAEDLIVPVSLSRYLSEKLPWVVYHELPKSGHMFPLADGMADTIVKSLLLGDQPPQA

SEQ ID NO: 176 - DNA, 2016 bp, Oryza sativa
gttgttgctgttgcttggctcctctcttctcccactccctcgcgaactcgatcgcttgctgcctttgctggccttggcaaccgccgcatggcggcctccggcgtgaagcggccaccgaggccggccccggcctcctccggcgtaaggaagctcattctagctctggccgtgttcttgccggcgctgctgtacagtcagctccagcctccgcctccgaagatctgcggctccccgggtggccctccgattacagggacaagaacacggctcaaagacggtaggtatttggcctacctggagtccggcgttccaaaggagcaggccaagtacaagatcatctttgttcatggtttcgactcgtgcagatacgatgcactccctatttccccggtaaagatactggcacttacctatcttgttcatttttcaagtctgaacactttaaacagtctggttaaaaactactccctccgttccaaagtattaacatttagtcatttacggtatatcttgaaactgggggaagaatacagtgtatttagttatgtttcagatttcagagcatagtgatacatgatcatgatgatcatatcatggactgagactgaaactggtgcaggagctggcgcaagagctgggcatttaccagctgtccttcgatcggccggggtacgccgagagcgacccaaacctggcaagtacagagaagagcatcgccctggacatcgaggagctcgccgacaacctgcagctgggccccaagttctacctcatgggcttctccatgggcggcgagatcatgtggagctgcctcaaacacatctcacacaggtaattagcttgtgttatcactgttcttacttcagctgatcagcgttttcttctctgaaaaatctatggcaggactgcaaatttctgaactctgaccaatgtgtttattcatgcaggctcgccggggtggccattcttgcccccgtgggcaactattggtggtccggcttgccgtcgaacatgtcgtggcacgtctggaaccagcagctcccgcaggataagtgggcggtctgggtctcacaccacctgccatggctcacctactggtggaactcccagaagctcttccctgcctccagcgtcatcgcctacaacccggctctcttctctgaaggagacaagctcctcctgtccaagttcgccttccgaacctacatggtaaggatcactggattacttcatcacgttgcattgcatatttgcttgtaactggcgttttgctcatcggtttgcgtgtcgttgtcgcagccgcagataaggcagcagggggagtatggctgcctgcaccgcgacatgacagtcggattcgggaagtggagctggagcccactggagctcgaggacccgttcgccggcggcgaagggaaggtgcacctgtggcacggcgccgaggatctgatcgtgccggtcagcctgtccaggtacctcagcgagaaactcccctgggtcgtctaccacgagctccccaagtccggccacatgttccctctcgccgacgggatggccgacaccatcgtcaagtcgctgctgctcggggatcagccacctcaggcctcctgattcgaactcctctagtgtgcttttcccgtccttcattaagtacatattgctggccctgatagttaatgagctggtcgtcagctcgtggtgacttaataagatttcccaatttaggatgattgagaaatttgccggatttctacacttctgcccgagactgttcttccccaccgtgtttgaaccgcggcctgtgtaactctaagttcaagttcgttatgggctaatcgcattaggattgcgtttcgttttcgtttggaccgagaaactatggcccataaggcttggtctggtcgggttgcttaggcacaactagaaataagtccactttaactcccacaaatataggtccaatctaatttgtattcctcaactgcaatctgattattaaaatcagtgtattttgac

SEQ ID NO: 177 - DNA, 1321 bp, Oryza sativa
aaattcagcaattccccgtctcgtgccaatctgttctttccgtcgcgccccatcgaccggaccccgatgatggccggcggcgacctgcgcagcctgttggccgtcgttgccgcggtggccgcggccatgtcgtacgttcgcttcgtggcgcgccgcctccgccctggcctgccccgcctcgccgcgttcgtgccgctgctcgccgtcctccccgtcatcccgctcgcgttccgcgcgctccatctccgcgtcacctccgggttcttcctcggatggctcgcggagttcaagctgctgctccttgcctcggggcatggcccgctcgacacgtccctcccgctgcccgccttcgtcgccatcgcctccttgcccgtcaggcgacgcgcgcagcgcgattccgagaacgccccgcgcccgggccttggcctcgtcacctccgccgtgatggccgcgctgctcgccaccatcgtgtcggtctacccccacaaggagcggatgaacgagtacgtcctgctgatgctgtactcgctgcacgtctacctcgcgctggagctcgtcctggcgttcgccgcggcggcggcgcgcgcggtgatggggatggacttagagccgcagttcgaccggccctacctgtcggcgagcctgcgggagttctggggcaggcggtggaacctgtcggtgcccgcgctgctccgccagtgcgtgagccgccccgtgcgcgcgcgcgtaggcggcggcgtcgccggcgtcgccgcgggggtgctcgcggcgttcctcgtctcggggatcatgcacgaggcggtgatctactacgccacgctgcggccgccgacgggggagccgaccgcgttcttcgcgctgcacggggcgtgcgcggtggcggaggggtggtttgctgcgcacaaggggtggccgcggccgccgcgcgccgttgcgaccgccctgacgctggcgttcatcctagcgacggggttctggctcatcgtcccgccgatcacgaggaccgggactgacagggtggtgatcgcggagagcgaggccatggtcgcgttcgttcgggacgccggaagctgggccgccgcatccgtccgatcggctttgaccggccactcctagtttgattacgacgggtcactggcgcatctctcgttcagttcacggtacaaatttgtatattgatttttcgttagatttggagctacagatttttcatgtagctttagatttatgtatatagaaagaaaaaaattatttgattagtgctgctaaatttaaaattagaaattcatgatgaattaatacaaagttatactcgttctat

SEQ ID NO: 178 - protein, 349 aa, Oryza sativa
MMAGGDLRSLLAVVAAVAAAMSYVRFVARRLRPGLPRLAAFVPLLAVLPVIPLAFRALHLRVTSGFFLGWLAEFKLLLLASGHGPLDTSLPLPAFVAIASLPVRRRAQRDSENAPRPGLGLVTSAVMAALLATIVSVYPHKERMNEYVLLMLYSLHVYLALELVLAFAAAAARAVMGMDLEPQFDRPYLSASLREFWGRRWNLSVPALLRQCVSRPVRARVGGGVAGVAAGVLAAFLVSGIMHEAVIYYATLRPPTGEPTAFFALHGACAVAEGWFAAHKGWPRPPRAVATALTLAFILATGFWLIVPPITRTGTDRVVIAESEAMVAFVRDAGSWAAASVRSALTGHS

SEQ ID NO: 179 - DNA, 1329 bp, Oryza sativa
ggcatagacctagccagctagcaaccgacaagccaaggcgacggcaatggcgccgacgacgacggccacggcggcggcggagcaggcgccgccgccgcagcatacgaggaaggcggtggggctcgccgcgcacgacgactccggccacctcacacccatccgcatctcgcgcaggaaaactggagatgacgacgtcgctataaaggtgctgtactgtgggatttgtcactctgacctgcacaccatcaagaatgagtggagaaacgctgtctacccagttgttgcagggcacgagatcaccggggtggtgaccgaggtggggaagaacgtggcgaggttcaaggccggcgacgaggtcggcgtcgggtgcatggtgaacacctgcggcggctgcgagagctgccgggacggctgcgagaactactgctccggcggggtcgtcttcacctacaactccgtcgaccgggacggcacgcgcacctacggcggctactccgacgcggtggtcgtcagccagcgcttcgtcgtgcgcttcccctcctccgccggcggcggcgccggcgccgcgctgccgctggacagcggcgcgccgctgctgtgcgccggggtgacggtgtacgcgccgatgaggcagcatgggctgtgcgaggccgggaagcacgtcggcgtggtggggctcggcgggctcggccacgtcgccgtcaagttcgccagggcgttcgggatgagggtgacggtgatcagcacgtcgccggtgaagaggcaggaggccctggagaggctcggcgccgacggcttcatcgtcagcaccaacgccagtgagatgaaggctgcgatgggcaccatgcatggcatcatcaacacggcctctgcaagcacatccatgcactcttacctggcactcttgaagcccaagggcaagatgatcttggttggcctgcctgagaagcctctccagatcccaaccttcgctttggttggagggggcaagatactagctgggagctgcatggggagcatcagtgaaacgcaggagatgatcgacttcgccgccgagcacggggtggccgccgacatcgagctgatcggcgccgacgaggtgaacacggccatggagcgcctcgccaagggcgacgtcaggtaccgcttcgtcgtcgacatcggcaacaccctcaggtcggattgactagggagctcactgtcactggtctcagctctgtagcataccggacctgcaatcctgcaaagtagtgcaatcttcttgctacaagacatacatatcacctctacttggtgtcaataaatgtagcaaaagaggtacattgttgt

SEQ ID NO: 180 - protein, 379 aa, Oryza sativa
MAPTTTATAAAEQAPPPQHTRKAVGLAAHDDSGHLTPIRISRRKTGDDDVAIKVLYCGICHSDLHTIKNEWRNAVYPVVAGHEITGVVTEVGKNVARFKAGDEVGVGCMVNTCGGCESCRDGCENYCSGGVVFTYNSVDRDGTRTYGGYSDAVVVSQRFVVRFPSSAGGGAGAALPLDSGAPLLCAGVTVYAPMRQHGLCEAGKHVGVVGLGGLGHVAVKFARAFGMRVTVISTSPVKRQEALERLGADGFIVSTNASEMKAAMGTMHGIINTASASTSMHSYLALLKPKGKMILVGLPEKPLQIPTFALVGGGKILAGSCMGSISETQEMIDFAAEHGVAADIELIGADEVNTAMERLAKGDVRYRFVVDIGNTLRSD

SEQ ID NO: 181 - DNA, 1944 bp, Oryza sativa
atgggggacttgaattccagtttaagggtcctgaagattgaacagtgccctgttctgaaggtctttccactgtttcagaactcccagcaatttaaaatcgagcgaatgtcatggttgtctagtcttaccaagcttaccatcaatgattgtcctcatttgcatgtgcacaatcctcttccgccttcaactattgtttcggaattatttatcgctggagtttcaacacttccaagggtggaggggtcatcccacggaacattaagaattggacgtcatcctaatgatattttcagttttgattccgatgatattttagagctaatgatattggatgataaatctctatcattccatagcttgaggtccctaactagattggtaatagatggttgcaaaaaccttatgtctgttttatttgaaagtttaaggcaactcttgcgtttgaagagtttggggatatacaactgcccacaacttttctcttcaaatgtcccatcggagcttaccagtgaagacacgacaggtgcaaatcgcaacgccctcccttctctcgaatgtcttgatattgcttcttgtggaattaatgggaagtggctatctctgatgctgcaacatgcggaggtcctacagaaattgagtataacctcgtgttggcagataagagggctatcaataggagaggaagaaaatggtcatccaaatcttatgtcagctacagaggcttcgtcgtcaggatatccaagtcgagacgaacttttgcaccttccattaaatctcatcccatctctgaagaaggtaactattagattctgcagtttaagattttatggaaacaaggaaggtttcgctagatttaccttccttgagggcatagcaatttcgcgatgccctgagctgatctcgtccttggtgcataacaacagaaaggatgagcaggtgaacggaagatggctcctcccgccatcaattgtagaacttgagattcaagatgataattatctacaaatgttgcagccctgctttccagggagcctcacccacctgaaaagactacaagtacagggaaacccaaatttaacatctctgcagctgcattcctgcacagagctccaagagttgataattcaaagctgtaggtcacttaattctctacaaggcttgcaatcactctgcaacctcaggttgctgcgggcatacagatgcctcggcgatcttggaggagatgaaaggtgtctccttccgcaatcaattgaggaacttgatatcgacgagtattttcaagaaactctgcagccattctttccaaggaatctcacctgcctaaaaaaattacgagtatcaggcactacaagttttaaatctctagaactgatgtcatgcactgcactcgaacatttgaagattgaaggttgtgcatcgcttgctacattagtgggcttgcaatccctccacagcctcaggcatttggaagtatttagatgccctagcttgcctctatgtttggagagtttgtcagggcagggctatgagctatgccctcgattggaaaggctccagatcgatgacctctctatccttactacgtcgctctgccagcacctcatctcagtccaattcctagagctttacggagatccatacctttacattcgtggagtcgaagtggcaagactaacggatgagcaagagagagcgcttcagctcctcacgtccttgcaagagctccaattcaagtctcatgacagtcttgtagatcttcctacagggctgcataaccttccttccctcaagaggttgaagatcgataattgcaagagcatcatgaggctgccagagaagggtctcccaccttcgttggaagaattgcatatcagcaattgcagcaaagagctagctgaccattgcagaatgctagaaagcaagctgatggtatcaactgattga

SEQ ID NO: 182 - protein, 647 aa, Oryza sativa
MGDLNSSLRVLKIEQCPVLKVFPLFQNSQQFKIERMSWLSSLTKLTINDCPHLHVHNPLPPSTIVSELFIAGVSTLPRVEGSSHGTLRIGRHPNDIFSFDSDDILELMILDDKSLSFHSLRSLTRLVIDGCKNLMSVLFESLRQLLRLKSLGIYNCPQLFSSNVPSELTSEDTTGANRNALPSLECLDIASCGINGKWLSLMLQHAEVLQKLSITSCWQIRGLSIGEEENGHPNLMSATEASSSGYPSRDELLHLPLNLIPSLKKVTIRFCSLRFYGNKEGFARFTFLEGIAISRCPELISSLVHNNRKDEQVNGRWLLPPSIVELEIQDDNYLQMLQPCFPGSLTHLKRLQVQGNPNLTSLQLHSCTELQELIIQSCRSLNSLQGLQSLCNLRLLRAYRCLGDLGGDERCLLPQSIEELDIDEYFQETLQPFFPRNLTCLKKLRVSGTTSFKSLELMSCTALEHLKIEGCASLATLVGLQSLHSLRHLEVFRCPSLPLCLESLSGQGYELCPRLERLQIDDLSILTTSLCQHLISVQFLELYGDPYLYIRGVEVARLTDEQERALQLLTSLQELQFKSHDSLVDLPTGLHNLPSLKRLKIDNCKSIMRLPEKGLPPSLEELHISNCSKELADHCRMLESKLMVSTD

SEQ ID NO: 183 - DNA, 1064 bp, Oryza sativa
ggtcggcgtccccaagacgatcgacaacgacatcgccgtgatcgaccgctcgttcgggttcgacaccgccgtggaggaggcccagcgcgccatcaacgccgcccacgtcgaggccgagagcgccgagaacggcgtcggcgtcgtcaagctcatggggcggaacagcggcttcatcgccatgtacgccacgctcgccagccgcgacgtcgacctgtgcctcatcccggagtcccccttctacctcgaaggcaagggcggcctcctcgagttcgccgagaagcggctgcgcgagaacggccacatggtgatcgtcgtcgccgagggcgccggccaggacgtgatcgccaggagcatgcgcctcgccgacgcgcacgacgcgtcgggcaacaaggtgctcctcgacgtcggcctctggctgtgcgccaagatcaaggatcacttcaagaagaaggcgaatttccccatcacgctcaagtacatcgaccccacgtacatgatccgcgccgtgccgtccaacgcctccgacaacgtctactgctcgctgctcgcccacagcgccatccatggcgccatggccgggtacaccggcttcaccgtcgcacccgtcaatggccgccacgcctacatccccttctacaggatcacggagaagcagaacaaggtggtcatcacggacaggatgtgggcgagggtgctctgctcgacgaaccagccgtgcttcctcagcacggaggacgtcgagaaggcagggcaggacgacgaggagccgatcgtgccgctcgtcgagggcgagaactcgctcgtcaaggcgccgccgctgctggccaacgccggcgatcgcgccgccctctgcaacggcgccgcctgaagcttgaagaagtagctacacgaagaagacgatcacacggccatgtttggtagtgcgaaattcacagaaatgtttatgtaattgtaggatttttttttctttagattctttttgctcattcatttttcggcttgccggtatagaggaagtattgacaaaatgagaataattgaaagtttatgtggcaattgtttgc

SEQ ID NO: 184 - protein, 238 aa, Oryza sativa
MGRNSGFIAMYATLASRDVDLCLIPESPFYLEGKGGLLEFAEKRLRENGHMVIVVAEGAGQDVIARSMRLADAHDASGNKVLLDVGLWLCAKIKDHFKKKANFPITLKYIDPTYMIRAVPSNASDNVYCSLLAHSAIHGAMAGYTGFTVAPVNGRHAYIPFYRITEKQNKVVITDRMWARVLCSTNQPCFLSTEDVEKAGQDDEEPIVPLVEGENSLVKAPPLLANAGDRAALCNGAA

SEQ ID NO: 185 - DNA, 2224 bp, Oryza sativa
cctagctggttctatagtggtcacaactcacagccaaaacctcgtacattttcagctagccacaagcaacacaagtccaagacaagtcaagcgttcgcaccaagtcaaaccgcgcctcactgccaccttcgtttgcgcaccatggagcttgccctggttggcaacccttcgaatggcgtggcgaagccgtcgtgcaactccgtcggctcgctgcccgtcgtcagctccaacgccgtcatcaacccgccggtgaccagcgcggcgggcgccacgctcggcaggcacctcgcgaggcgcctcgtacagatcggcgccaccgacgtgttcgccgtccccggggacttcaacctcaccctgctcgactacctcatcgccgagcccgggctcaagctcatcggctgctgcaatgagctcaacgccgggtacgcggccgacggctacgcccgcgcccgcggcgtcggcgcctgcgccgtcacgttcaccgtcggtggcctcagcgtgctcaacgctatcgccggcgcctacagcgagaacctccccgtgatctgcatcgtcggcgggcccaactccaacgactacggcaccaaccgcatcctgcaccacaccatcggcctcccggacttctcacaggagctccgctgcttccagaccatcacctgctaccaggccgtcattaacaacctcgacgacgcgcacgagcagatcgacaccgccatcgcgacggcgctaagggagagcaagcccgtgtacatcagcgtgggctgcaacctggcaggcctctcccacccaacgttcagtcgcgagccagtgccactattcatctcgccaaggctgagcaacaaggcgaacttggagtacgccgtcgaagccgcggcggacttcctgaacaaggcggtgaagccggtgatggtcggtgggccaaagatccgggtggccaaggcgaagaaggcgttcgccggcatcgcggagtcgagcgggtacccgttcgcggtgatgccgtccgcaaagggcctcgtgccggagcaccacccgcggttcatcggcacgtactggggcgccgtgagcaccaccttctgcgccgagatcgtcgagtccgccgacgcctacctcttcgccggcccaatcttcaacgactacagctccgtcggctactccctgctgctgaagcgggagaaggccgtcatcgtgcagcctgaccgcgtggtggtcggcaacggcccggcgttcggctgcatcctcatgacggagttcctcgacgcgctcgccaagcgcctcgaccgcaacacgacggcatacgacaactaccgccgcatcttcatccccgaccgcgagccgcccaatggccagcccgacgagccactcagggtcaacatcctcttcaagcacatcaaggagatgctgtctggcgacaccgccgtcatcgccgagaccggcgactcgtggttcaactgccagaagctcaggctccccgagggctgcgggtacgagttccagatgcagtacggctcaatcggttggtccgtcggcgccacgctcggatacgcccaggcggccaaggacaagcgcgtcatctcctgcatcggcgacggaagcttccagatgacggcgcaggacgtgtcgacgatgctgcggtgcgggcagaagagcatcatcttcctcatcaacaacggcgggtacaccatcgaggtggagatccacgacgggccgtacaacgtcatcaagaactgggactacaccggcctcatcgacgccatccacaactctgacggcaactgctggacaaagaaggtccggactgaggaggagctgatagaggcgatcgcgacggcgacgggcgccaagaaagactgcctctgcttcatcgagatcatcgtgcacaaagatgacacgagcaaagagcttctcgagtggggatccagggtctcggctgccaacagcaggccgcctaatccccagtgatcttgctgctcgtcttctcaggacgcacactcgaaattgctgggctgccaatgtctaagatgtgctgcttatcatcgtctgtgaattaattgtttaacgcttctgtttctgtatccattcaaaattttcttagagaagaggttgaattagtacatgtcgatgggtgttacctatcctatgataatgtatgtaattcaaatgcttggaattaatgttttgtaaacctacactatattgcgatgcaataacatggacgatttgaagg

SEQ ID NO: 186 - protein, 605 aa, Oryza sativa
MELALVGNPSNGVAKPSCNSVGSLPVVSSNAVINPPVTSAAGATLGRHLARRLVQIGATDVFAVPGDFNLTLLDYLIAEPGLKLIGCCNELNAGYAADGYARARGVGACAVTFTVGGLSVLNAIAGAYSENLPVICIVGGPNSNDYGTNRILHHTIGLPDFSQELRCFQTITCYQAVINNLDDAHEQIDTAIATALRESKPVYISVGCNLAGLSHPTFSREPVPLFISPRLSNKANLEYAVEAAADFLNKAVKPVMVGGPKIRVAKAKKAFAGIAESSGYPFAVMPSAKGLVPEHHPRFIGTYWGAVSTTFCAEIVESADAYLFAGPIFNDYSSVGYSLLLKREKAVIVQPDRVVVGNGPAFGCILMTEFLDALAKRLDRNTTAYDNYRRIFIPDREPPNGQPDEPLRVNILFKHIKEMLSGDTAVIAETGDSWFNCQKLRLPEGCGYEFQMQYGSIGWSVGATLGYAQAAKDKRVISCIGDGSFQMTAQDVSTMLRCGQKSIIFLINNGGYTIEVEIHDGPYNVIKNWDYTGLIDAIHNSDGNCWTKKVRTEEELIEAIATATGAKKDCLCFIEIIVHKDDTSKELLEWGSRVSAANSRPPNPQ

SEQ ID NO: 187 - DNA, 1508 bp, Oryza sativa
gtatagcaaaaacacatttccaacattcggtcttcactactagctagtagtgtttttttcctacatatataaacaataattattcattgacaggcatcaagctagctagctagccaactgtctgcaagaagaagaagaagaagaaggtgcaggataaatcgatgaagaaggcgtcgtcgctgtctgagctggggttcgacgccgatggcccgtcattcttccggcacctgacgctgaccgatggcgacgacggcacgctgccccggcggcggctgatcaagatctcggtgatcggcgcgggcaacgtgggcatggccatcgcgcagacgatcctgacgcaggacctcgccgacgagatcgtgctgatcgacgcggtggcggacaaggtgcggggcgagatgctggacctgcagcacgcggcggcgttcctcccccgcgtgaacatcgtgtccggcacggaggtgtcgctgacgaggagctcggacctggtgatcgtgacggcgggggctcggcagatcccgggggagacgcggctgaacctgctgcagcggaacgtgtcgctgttccggaagatcgtgccggcggcggcggaggcgtcgccggagtcggtgctggtgatcgtgtcgaacccggtggacgtgctgacgtacgtggcgtggaagctgtcggggttcccggcgagcagggtgatcgggtcggggacgaacctggactcgtctcggttcaggttcctcctcgccgagcacctggaggtgagcgcgcaggacgtgcaggcgtacatggtgggggagcacggggacagctcggtggcgctgtggtcgagcatcagcgtgggggggatgccggtgctggcgcacctgcagaagaaccaccggtcggcggcgacggcgaagaagttcgacgaggcggcgctggaggggatccggcgggcggtggtggggagcgcgtacgaggtgatcaagctcaaggggtacacgtcgtgggccatcggctactccgtcgccagcatcgcctggtcgctgctccgtgaccagcgccgcatccacccggtctccgtcctcgccaagggccttgtccgtggcgtccccgccgaccgcgagctcttcctcagcctgcccgctcgcctcggccgcgccggcgtgcttggcgtcgccgccgagctggtgctcaccgacgaggaggagaggaggcttcgcatctccgccgaaaccctctggggatactgccacgccctcggcctctaaattcattaattactacgccaacccgtttatatatgcccatatatatatgattaataatcgtcgtgctaatgcctatcgatcgatattatgcatcatcgtatatgtcggtcgatcgaagcttaatttcatggccgcccgggttgtaataagctactattctcattgtgtgattaattagctctatttctctgattgagctaattatgtgtaactgtatacacattgtgttcaaacaataatggaatgaataaaattgattgagac

SEQ ID NO: 188 - protein, 360 aa, Oryza sativa
MKKASSLSELGFDADGPSFFRHLTLTDGDDGTLPRRRLIKISVIGAGNVGMAIAQTILTQDLADEIVLIDAVADKVRGEMLDLQHAAAFLPRVNIVSGTEVSLTRSSDLVIVTAGARQIPGETRLNLLQRNVSLFRKIVPAAAEASPESVLVIVSNPVDVLTYVAWKLSGFPASRVIGSGTNLDSSRFRFLLAEHLEVSAQDVQAYMVGEHGDSSVALWSSISVGGMPVLAHLQKNHRSAATAKKFDEAALEGIRRAVVGSAYEVIKLKGYTSWAIGYSVASIAWSLLRDQRRIHPVSVLAKGLVRGVPADRELFLSLPARLGRAGVLGVAAELVLTDEEERRLRISAETLWGYCHALGL

SEQ ID NO: 189 - DNA, 2895 bp, Oryza sativa
atggtagagccagtgaccgctagtgccgcagtgggatggggcatatcagctgttggttgggtagtctcgcccatcatcaccaaactgctcggcgaaggcttctccttccttggttttgaaacaaaagagaagctaaaagaactcgagactaaagtgttagagctacaaatgttacgagaagtagtcgaggagagtcctcacagggctcgtttgatgaaatggtcggaggaacttaaatctgctttgtacgacgctgaagacatcttcgatgatgttgagtataaccgcctcgaaaggcggattttgtctgaatccgacgacatgcaggagtcggacttcagggctcgtcctgccctgtcctgcgtcaaaggaaaacagttgttgataatatatgctagaaatgaatatggtcagaattctacactggataaaaaggtgtgtggtaccagctcagaccaccatggcatgtcaaaatcaaagttgaagaaaatcctaggtaacatagagaaaattattaacgaaggacacgatattttgaagcttctggatttgaagaaggcggttgctaccaattcacgagctgcagtaactacttcggctcctccaaatgttgtatttggtcgagatgaagatcgtaataaggtcatagcaatgcttcatgatagatcaggtgatgaacaaccaaactccagcagtgctctaaattattctgttattggtatttatggcatcgctgggtctggaaaatcaacccttgcacaatatgttattgcccatgagaaagagcttaggcgggagaaatcacctggtcatttcgatcttatcatgtgggttcatgtttctcagaaatttagcgtgaatgccatttttactgagatgcttgacgcagccacagagagaggggggcatcagttcagtaatcttgataccctacaacagaaactggaagaggaattgaatggaaagaagatcctgttggtactagatgatgtatggtaccatgacagtgtgagccagctgcagctagagaagatagtttctccgctgaatgtcggaagtgcaggaagcaaaatcctcgtaactagtagaagtaaagatgcattggttgccctgggtgctgtgaggcgtattcccatatcagagttgaatgatagtgtctttcttgaactgttcatgcattccgcactatcaggtgcaaacattgatgaacgggatcggaatgttttcgcggaaattggacgtggcattgcaaacaagctgaggaaatctcctctagcggccaaattagttggaggacaattgcgtatgagaccagatgtcgacttctggagagatgctggtaatagggaccttttgaaagatacacggggggctctttggtggagttaccagcacctcgatgagcaggtcagaagatgctttgcttattgcagtattttcccccggagacatcggctgaaacgcgaagagttaattaaattgtgggtggcagaagggtttatagaaactactggtgaaggaggagaagaagaagctcttgctgggaaatactttgagcagttagtgtcaagctcatttcttcagccaggagtaaatcaagaaggagtgtttcattcctttgaatacttcacgattcatgatctgctacatgacatagcagaggaggtctccagaagtgattgcttcagggtagaggatggctggaaaggtgttattcctccgaatgttcgccatatttccattgagacttatagccgtgcaatcattcagaaggttttggaaatggaaaatctgcgcacgttgatcatttatagtgtcaaaaccgaaatgctgattgaggaaaaagagttcgaagatatgttcacgaggctgaggaaattgcgggtacttcatcttgtaacggcgacaacatcaaatacattctcgttcccagcatcgattgaaaaattaaagcatctacgctatctcagtttgcagacgggcgaggcagtcaaactccatctcagttcgcagacggacgagtcagtcaaacttattttaccaggcacatttaccaagctttaccatatgcaggtgctggattttatcggaaacacagatctggtattttccgctggtaaagaaatgagtaacctcatcaacttgaggcacttgatcagctttacaagtatgaattttccaaacattggcagactaaccttgctccaaacgttaaaattcttcacagtaaagaaggaacctgggtacgagttacagcagctgaagcacctaaagaatctgcaaggcaagctgcagatcgacggtcttcaaaatgttcatagcaagaatgaagctgttgaagccaatctagctggtaaagaatgtctcaaagaactgagcctgttctgggaagatgagagctccaatccaaacgagcaagaagaggttattgagggccttcagccaccgatgggacttcaaaacctagaaatctttcgttaccaaggttctaggtacccaagctggatggtggataagcagaccggcctgaagaaccttcgcgtgcttgctcttagcaactgcagacaattgaaacctgctccagaactttttgagctgttggttcatctgcagtcgttctcgctctgtggctgcagctgggacaccttgcccgataatatggagcaactcatgtccctccaaaatctgatgatctatctgtgcacgaatctcctgtcacttccaactttaccccggtctctggcgcatcttgtaattgggaattgcgacccttggttcacaaggtcctgtcagacaattgcgcatgaaaactggcaaaaggtccagcacattcccaacaaagaaatattttgcgacggtgctttattcgcgattctgcggcaaagaaatcattaa

SEQ ID NO: 190 - protein, 964 aa, Oryza sativa
MVEPVTASAAVGWGISAVGWVVSPIITKLLGEGFSFLGFETKEKLKELETKVLELQMLREVVEESPHRARLMKWSEELKSALYDAEDIFDDVEYNRLERRILSESDDMQESDFRARPALSCVKGKQLLIIYARNEYGQNSTLDKKVCGTSSDHHGMSKSKLKKILGNIEKIINEGHDILKLLDLKKAVATNSRAAVTTSAPPNVVFGRDEDRNKVIAMLHDRSGDEQPNSSSALNYSVIGIYGIAGSGKSTLAQYVIAHEKELRREKSPGHFDLIMWVHVSQKFSVNAIFTEMLDAATERGGHQFSNLDTLQQKLEEELNGKKILLVLDDVWYHDSVSQLQLEKIVSPLNVGSAGSKILVTSRSKDALVALGAVRRIPISELNDSVFLELFMHSALSGANIDERDRNVFAEIGRGIANKLRKSPLAAKLVGGQLRMRPDVDFWRDAGNRDLLKDTRGALWWSYQHLDEQVRRCFAYCSIFPRRHRLKREELIKLWVAEGFIETTGEGGEEEALAGKYFEQLVSSSFLQPGVNQEGVFHSFEYFTIHDLLHDIAEEVSRSDCFRVEDGWKGVIPPNVRHISIETYSRAIIQKVLEMENLRTLIIYSVKTEMLIEEKEFEDMFTRLRKLRVLHLVTATTSNTFSFPASIEKLKHLRYLSLQTGEAVKLHLSSQTDESVKLILPGTFTKLYHMQVLDFIGNTDLVFSAGKEMSNLINLRHLISFTSMNFPNIGRLTLLQTLKFFTVKKEPGYELQQLKHLKNLQGKLQIDGLQNVHSKNEAVEANLAGKECLKELSLFWEDESSNPNEQEEVIEGLQPPMGLQNLEIFRYQGSRYPSWMVDKQTGLKNLRVLALSNCRQLKPAPELFELLVHLQSFSLCGCSWDTLPDNMEQLMSLQNLMIYLCTNLLSLPTLPRSLAHLVIGNCDPWFTRSCQTIAHENWQKVQHIPNKEIFCDGALFAILRQRNH

SEQ ID NO: 191 - DNA, 1757 bp, Oryza sativa
aataagcaaaccaatgatctactaagcatctaaccactacaagatggccgcggcgcctatgagcttcgcttttacgctgctcgcggcttgcatttccttcttgcaccacgcgccggccgccgccgcagccgctccggcgaaccagaccgccggctttctcgactgcctcgccgcgagcctccctgccggcgtcgtctacacgcacgcgtcccggtcgtaccagtccgtcctcgagtcctccatcaagaacctcctcttcgacacgccggccaccccgacgccggtcgcggtcgtcgaggccaccgacgcctcgcacgtccaggccgccgtgcgctgcggcgtcggccatggcgtctccgtccgctcccgcagcggcgggcatgactacgagggcctgtcctaccgctccctcgacgcggcccgcgccttcgccgtcgtcgacatggcgggcggcgcgctccgcgcggtccgcgtcgacgtcctcggccgggcggcgtgggtcggctccggcgcgacgctcggcgaggtgtactacgccatcgccaacaagacctcccgcctcgggttccccggcagcgtcggcccgacggtcggcgtcggcgggttcctcagcggcggcggcttcggcctgatgctgcggaagcacggcctcgcctccgaccacgtcctcgacgccaccatggtggaggccaaggggaggctcctcgacagggccgccatgggcgaggacctcttctgggccatccggggcggcggcggcggcaacttcgggatcgtcctgtcctggaagctccggctcgtccccgttccggccaccgtcacggtgttcaccgtccaccgctcaaggaaccagtccgccaccgacctcctcgccaagtggcagcgcgtggcgccgtccctccccagcgacgccttcctccgcgtcgtcgtgcagaaccagaacgcgcagttcgagtccctgtacctcggcacgcgcgccggcctcgtcgccgccatggccgacgccttcccggagctcaacgtgacggcgagcgactgcatcgagatgacgtgggtccagtccgtgctctacttcgcgttctacggcacggggaagccgccggagatgctcctggacaggggcaccggcaggccggacaggtacttcaaggccaagtccgactacgtccaagaacccatgcccagccaggtctgggagaccacctggagctggctcctcaaggacggcgccggactgctcatcctcgacccctacggcggcgagatggctcgcgtcgcgccggcggcgacgccgttcccgcaccggcaggcgctctacaacatccagtactacgggttctggtcggagagcggggctccggcggcggcgaagcacatgggctggatcagaggggtgtacggggagatggagccgtacgtgtccaagaaccccaggggcgcctacgtcaactacagggacctcgacctcggcgtgaacgacgatggcgacggcggcggcggcgtggcgagggcgaggtatgagaaggcgacggtttgggggagagcgtacttcaaggccaactttgagcggctcgcggcggtgaaggccaaggtggatcctgacaactacttcaagaacgagcagagcattccaccacttccgagttagaatgctgtggcctccagctccagccattcttctgctatagtaataatagaactagtcaaattctcatgtgttactacattataataaagtgagtatttgatagtttttt

SEQ ID NO: 192 - protein, 534 aa, Oryza sativa
MAAAPMSFAFTLLAACISFLHHAPAAAAAAPANQTAGFLDCLAASLPAGVVYTHASRSYQSVLESSIKNLLFDTPATPTPVAVVEATDASHVQAAVRCGVGHGVSVRSRSGGHDYEGLSYRSLDAARAFAVVDMAGGALRAVRVDVLGRAAWVGSGATLGEVYYAIANKTSRLGFPGSVGPTVGVGGFLSGGGFGLMLRKHGLASDHVLDATMVEAKGRLLDRAAMGEDLFWAIRGGGGGNFGIVLSWKLRLVPVPATVTVFTVHRSRNQSATDLLAKWQRVAPSLPSDAFLRVVVQNQNAQFESLYLGTRAGLVAAMADAFPELNVTASDCIEMTWVQSVLYFAFYGTGKPPEMLLDRGTGRPDRYFKAKSDYVQEPMPSQVWETTWSWLLKDGAGLLILDPYGGEMARVAPAATPFPHRQALYNIQYYGFWSESGAPAAAKHMGWIRGVYGEMEPYVSKNPRGAYVNYRDLDLGVNDDGDGGGGVARARYEKATVWGRAYFKANFERLAAVKAKVDPDNYFKNEQSIPPLPS

SEQ ID NO: 193 - DNA, 846 bp, Oryza sativa
aggctagatgcagcagcttgcagcctccctcctcgtgctcctctcacgctcgcaacgcccataaatacccaggtgctcgcagcccacggatcatcatcaaacgagacaagagtcacagttcgagtcagagctatctaaccaatccatccatcgagcaattgttgatccgtctgtgaattgtgatggcggcggcggagggggagcaggggaagacggtggtggtggtcggggtggacgacagcgagcacagcaactacgcgctggagtggacgatgcagcacctggcgagcggcatggcgggcagcggcggcgccgagctcgtcatcgtccacgccaagccctcgccgtcctccgtcgtcggcttcggcgccggccccgggtctggagaggtggtgagatacgtggaggccgacctgcgcaagacggcggaggatgtcgtcgagaaggcgcgccgcctctgcatcgccaacgcgatgcacgcgttgatcgaggtgatcgaaggggagcccaggtacgtgctgtgcaacgcggtggagaagcacagcgcggggttgctcgtcgtcggcagccatggctacggcgcaatcaagagggccttcctggggagcgtcagcgactactgcgcccaccacgcgcactgctccgtcatgatcgtcaagcaacccaaggccaagcgctctcgtgccgagaccgcgtgaaaaacaccaaatttcgggtgtgagctgagccgagcaatgtgtgtgtggttcgcttgggtagcagcagcttcttgcgttctgtacatgggatgatttgtatgtgttagtttcataggttttatcagtttatgtatcgaaatgtttgtgc

SEQ ID NO: 194 - protein, 171 aa, Oryza sativa
MAAAEGEQGKTVVVVGVDDSEHSNYALEWTMQHLASGMAGSGGAELVIVHAKPSPSSVVGFGAGPGSGEVVRYVEADLRKTAEDVVEKARRLCIANAMHALIEVIEGEPRYVLCNAVEKHSAGLLVVGSHGYGAIKRAFLGSVSDYCAHHAHCSVMIVKQPKAKRSRAETA

SEQ ID NO: 195 - DNA, 4559 bp, Oryza sativa
tcaccagctagtcgcagagaaatataattaggttacattggcaacaatagaagagagaattttaatttgctaagagatgtcgtcgccacctgcagctttctccaatgaaggcgatgagcagccacagcgaagggctcctacaagcttccacccctctggggcaatttcttcctcagttaccagccacctactgcgcctaagcatgcttacatgaaagaacgggttcaagttgtgaaagaagaagttaggaaggtagtaaagggctcgagtgaagtaccagagatattggatcttgtgatcacgctgcaacggcttggattggatagttactacgagactgagataaacgaccttctctgcattgtttacaacaccgactacaacgataaagatttacacctagtttctcttcgattttatcttctacgaaagaacggctatgatgtgtcatctggtaattaaggtcttattgatgataagaattaattaattagtttcttccaaagaaacaactaacaaagtatttgatgatagatgcaaggacatgtatttctaactgtcctatataattaagcccatagcatataggaactttcctttttttctactctattccaattatccaactgccctattcaaagatctcgaagaaggaatcaatacgaaccttatagattagtttgaaaaatatatagttcgcatctataaactaaatatatactaataacacccctagcatctagtagaaattagtgctgcggttaactgaaatattttaaacaaatcatattagaaaaacaacaaacagtctagattggagaaatttaattgaagtacctgtcataaaatttcatttatacattttagtataatgtatttcatatatactcatgcatgtagcctaattatgttctgttacatattctcatatacatatatagttggggacatgcacttaatatccataattttaagaagttaacatgatcacctttgcagatatgtttcaacattttaaagacaaagaggggagttttgttgctgatgatgtaagaagtcttttgagcttatataatgcggcatttctgaggactcatggtgaaaaagtacttgatgaagcaattgtttttacaactaaccgccttagatccgaattggaacatttgaaatctccggcagctgatgaagtgtctcttgctcttaatacacccctgttccggagggttagaatattagaaatacgaaactatattcctatttatgaaagtgctactacacgaaacgaatccatattagaatttgcaaagttgaatttcaatctccttcaacttatttattgtgaggagctaaaatctatcacagggtgagttaattactttaaagtgtataatgattatccaattccctcaaattattataaataagtaatttctagcatttgtgtataatacagatggtggaaagagcttaatgttgaatcaaacttaagcttcattcgggatagaatagtggaaatgcatttttggatgataggagcatgctcggagccccattattctctttcacgaattatacttacaaagatgatagcatttatcaccatactagatgatatatttgacacatatgctacaaccgaggagagcatgatgcttgccaaagcgatatatatgtaagccttcattacaatatgtgctaatatgaattgtagctttatattgtagctagttcttactaagtgtaaacatttccagttgtatagctagttcttactaagtgtaaacatttccagttgtatgtagaatctatttcactgtaggatgaacatcaggagtcaactattaaaaaattcatagtagaatggagcgaaggaactttatgaatatgaatactatatattgcgatgcacacatttttagtttaaatactagtaatgtattcaccataacatcttaaaatattaatctcatgtgtgtctcattaattgagtaaaagagtaggtggattgaattttctcctaaataattaccaaagatcaaggaaaacagttttctctaaaaataagcaacagaaacagtaaatctatttgggcatttactataataattgcttaaaagcaataataatagttggcatttgctgctatgcatgttttatgcaacatgaagttaatgctttacttgaatcatatccgaatccaatgtttgaggtaatttaatatttctaaaatcgattcgataaaggcaatgacacgcaaatatcatgtttacgtatattgcaattatcaagattattctatgatgataaacaaacaagagtaaaaacatagatataaaacagggcaaaattgaaaataattcattcatttcatttacagtaatttatcctaaaaaattaaatcgaacatcacataccatagactgagagcagtggagaaaaaatgttagatgaaaaaaattctagagtaatcatcatagtgcacacatcaaaatattaaattttggatagattgtttggacacgaaatgacaattttgccatatatatttcggacagtgcaaacaacggttatatttgggacactgcttcagtgactaccatatgactgaccatgagtagtactttgaagctacatcgtgccatacaccaatcttagtcaagaatataatgcttgccattttattttaccttaggagtttaggaaggtagagaagacaatcaagctacgaacattatcttttatcttggatatattatctgccatggaaataacataagaactgatgtatgtcaaaatttgttaatgccaataaatatgtatatactagacaaatttactagtcttctttcgtttattaaaaaaaccactatagctaatataatattttgagttgcggttccatacatgattgcacttttggttaatttgaattgtgaataaaattaaatggcactatattgtaacatacaggtgcaatgaaactgcaacagtgctacttccaaaatacatgaaggatttctacttatattatttaaagacatttgattcatttgaagaagcactatgtccaaacaaaagttatcgagtgtgttatctcaaagagttggtaagtattctaccccaaaactatttatggctaaagatgtagaattgttttatttttaatacatcgatatatctaatgggttgtaaaataaatgacaatatgtagttaccatattcttatgttagatctgtatttgaatatgccttcatatattttcatagttgttgatgatatattatgaaacaaattaatggtcaaaagtgcaatgttgatgaccatgtgaatcaggcgccttatatttttggatggagcgagtattagatagattggaatataatgatatagttatttatccatgattatgatacaaattttgttataaactatataacaacttcattgttagttatattctacatataaatatttatttgattgtatgttttaatagaatatatctaactcaacgaacaatactgattgttttatcctaagaggaaattatggtaaccactttatttatgacattctaatgactcaatcatattttttggtaaaatgatatttcttcaaaattatgcccgtataacggctgaattaacactacactttttacacctctaatatagttcaagaggttagttcaagaattctctcaagagataaaatggcgtgatgatcattacattccaaaaacaatagaggaacacctggaactttcaagaaagactgttggtgcctttgaactagcatgtgcttcttttgttgggatgggcgaccttgtagcaaaggaaactcttgattgccttttgacttatccagaacttcttaagtctttcacaacatgtgtacggctctcaaatgatattgcttcaacaaaggtcattttctaccattatatctttacacttatatatttatttatgtttagtaatcttcgacttcaattataaataactgaaacatgatgctatggaatctttcagcgtgaacaagcaggggaccaccaccatgcttctacaattcagagttatatgctccaacatggtgcaacagcgcatgaagcatgcgttgggataaaggagttgatagaagactcatggaaggatatgatgaaagaataccttacaccaacagacctgcaaccaaaaatcgtggcaagaacggttattgattttgcgcgaacgggtgattatatgtacaagcaagttgattcattcactatttcacatacaatcaaggatatgatagcatcgctctatatggagccgtataacatttaaatcaaaacatgtatttacattataaatattatattatccaatatagagtttcaaattgtaatatatattcactagctttcaataatgtgttggtggctgttgatcaccaaataatcattactttcagcctcattagaaagtttccatggttaaactaagaaatgttttccttagcttgttgtcacaatattatgtgcaatatactaagtccatatgatcttgttctgtcc

SEQ ID NO: 196 - protein, 114 aa, Oryza sativa
AATAKGSYKLPPLWGNFFLSYQPPTAPKHAYMKERVQVVKEEVRKVVKGSSEVPEILDLVITLQRLGLDSYYETEINDLLCIVYNTDYNDKDLHLVSLRFYLLRKNGYDVSSGN

SEQ ID NO: 197 - DNA, 1368 bp, Oryza sativa
gaccccccaacacaacagcactccacacacaattacacaacaatggcgtccgaacaacaacgccggcgatcaccacctaccatcctcgccgccatccttcttctctccttcttggcgacggccaacctcgccggcgccatcgatccagccggaaggagacggaacgtggtcgtcttctggggaggcaacaagaacgaaggcagcctccgttcagtctgcgacagtggactctacaacatcgtcatcatctccttctacagcctcttcggccatggccgctactgggacgacctctccggccacgacctccgccacatcggcgccgacatcacccactgccatttcaaggccgtctacgtcctcctctccatcggcggcggcgatggaaaagactactccctaccttcctccaaatccgccgccgacgccgccgacaacctctacaactccttcctcggcggcagccgcccgggagtctaccacccattcggcgatgacgtcacagtcgtcggcattgacttcttcattgaccgcggtcaacccgaccactactacgagatcgccgagcggatcaactacgacacccgccactggcgtgaccccatcgggttcaagctgacggcgacggtgagttgtgcgtacgacgactctgaccccaggatgaagaaggcgctggaaacctaccttttccggcgaatccacgtcaggttctacgatgatccgaggtgttcatacaaccatgccgggctcgccggcgtcatggcgcagtggaacaggtggtcggcgagttacccttataatgggaagatttacttggggctcgcggcggcgaatttgacggggaagaatgacatggtcgccgtcggtgagctctaccggaagctgctgccggcggtgcagaagacggatacctacggaggagtgatgctttggaacagctactatgactccatcactcactacggacggtatgtcagtgcctgggcttaattataagattcagagatcaaccaacgataatctctctatatatacgtgtgcctccatcatcagtccaatccgtgcgtgcatatagctcaatcactatcacagtaatcattacttagtacatgttgttttgtaatctttgctagcgaaagctagtgttttttttttatgtgcacaactcggtgtgccgccatacatgcatgtgtgatcgacgtatcagtctgtactctcccttttttatcttgctagcgaaagctagtattttgagtattattatctgcgcaatttggataccctacatcgctacgtgcttttgtaagctactaaccttgacggggttgaacctgtataaaaatatatctccctctatgtttatcatgt

SEQ ID NO: 198 - protein, 315 aa, Oryza sativa
MASEQQRRRSPPTILAAILLLSFLATANLAGAIDPAGRRRNVVVFWGGNKNEGSLRSVCDSGLYNIVIISFYSLFGHGRYWDDLSGHDLRHIGADITHCHFKAVYVLLSIGGGDGKDYSLPSSKSAADAADNLYNSFLGGSRPGVYHPFGDDVTVVGIDFFIDRGQPDHYYEIAERINYDTRHWRDPIGFKLTATVSCAYDDSDPRMKKALETYLFRRIHVRFYDDPRCSYNHAGLAGVMAQWNRWSASYPYNGKIYLGLAAANLTGKNDMVAVGELYRKLLPAVQKTDTYGGVMLWNSYYDSITHYGRYVSAWA

SEQ ID NO: 199 - DNA, 1629 bp, Oryza sativa
accagatgaattcccagttcagagtttcaggtactctcaatctgaaacatatagaggagctagtagcaaagagaagtaattagagtgagcttaagtagtaattaattagaggaggttaattaattagggaagatgataggatggggagatgtgtacaaggtggtgggggcaatggcgccgctgtacttcgcgctggggctagggtacgggtcggtgaggtggtggaggttcttcacggcggagcagtgcgccgccatcaacaccatggtggtctacttctccatgcccttcttcaccttcgacttcgtcgtccgcaccgacccgttcgccatgaactaccgcgtcatcgccgccgacgcggtgtccaaggcgatcgccatcgccgccatggcggcgtgggcgcgcacgcgctgcggctgcgccgccgccaaggccggggcgcagtcgtggtccatcaccgggttctccctcgccgcgctcaacaacacgctcgtcgtcggcgtgccgctgctcgacgccatgtacgggaggtgggcgcaggacctcgtggtgcagatcgccgtcgtgcagtccatggtgtggttcccgctcctgctcatggcgttcgagctccgcaaggcctgggtcgtcggcggcggcggcggcgtcgggccggcggtgatgtcgtcgtcgtcgccgccggagaagcagagcgacgtcgagatgaacggcgccgtcgtcgcggcgccgggcggcggcggcggcgtccggctaccgttctgggcgacggcgaggacggtggggctgaagctggcgaggaacccgaacgtgtacgccagcgttctcggcgtcgtgtgggcgtgcatcgcgtacaggtggcacctgagcttgccggggatcgtgacggggtcgctgcaggtgatgtccaggactggcacggggatgtccatgttcagcatggggttgttcatggggcagcaggagagggtgatagcgtgcggggcggggctgacggcgctggggatggcgctgcggttcgtcgccggtccgctcgccacgctcgtcggcgccgccgccctcggcctccgcggcgacgtcctgcacctcgccatcatacaggccgcactgcctcaatcgattgcttccttcgttttcgcaaaggagtatgggcttcatgccgatgtactcagcacggcggttatattcggaacattgatctctctgccgattctgattgcatattacgcggttctgggctttgtctaacatgcatttacagcacggcatgcttacttatattagatttgcttcggtccaacaaaaattatctcgagataccgatacctcacggtaccgataactcatctgctcagctagatccaacgatcgaaaataatttggtaccgtgaggtaccggtatttcgagatactttttgttggacgataacaaacctctaattacattggatgctgagatctaaaccaatgtggagcgtcaatgacgcaacagaaggatgttaattaatcagagtacttcagcaatagagagtttcagtgttgcaagctctgattaatgatctaatattccaattagtcgatattgtgtttcgagcaaagtaaataataaagttttcaacagttttgctacct

SEQ ID NO: 200 - protein, 415 aa, Oryza sativa
MGRCVQGGGGNGAAVLRAGARVRVGEVVEVLHGGAVRRHQHHGGLLLHALLHLRLRRPHRPVRHELPRHRRRRGVQGDRHRRHGGVGAHALRLRRRQGRGAVVVHHRVLPRRAQQHARRRRAAARRHVREVGAGPRGADRRRAVHGVVPAPAHGVRAPQGLGRRRRRRRRAGGDVVVVAAGEAERRRDERRRRRGAGRRRRRPATVLGDGEDGGAEAGEEPERVRQRSRRRVGVHRVQVAPELAGDRDGVAAGDVQDWHGDVHVQHGVVHGAAGEGDSVRGGADGAGDGAAVRRRSARHARRRRRPRPPRRRPAPRHHTGRTASIDCFLRFRKGVWASCRCTQHGGYIRNIDLSADSDCILRGSGLCLTCIYSTACLLILDLLRSNKNYLEIPIPHGTDNSSAQLDPTIENNLVP

SEQ ID NO: 201 - DNA, 664 bp, Oryza sativa
atcaaccaaagccaaccaaaaacttcctctgctgcttagctaaagaatcatcgccatcatgagtgtggagatcctcgacggcaagacggtccggagcttcgtggaggacgagggcgccttcaactcctcggtcgacggccgcttcgccgcgctcgacgccaaccgcgacggcctcctctcctacaccgagatggccggggagctgatgagcctccgcgtgctggagaagcacttcggcgtcgacgacgaggccgccatgggccccgacgagctcgtggagctgtaccgtggcctgttcgcgaggttcgaccgcgacggcaatggcgcggtggacctggaggagttccgggccgagatgaaggagatgctgctcgccgtcgccaatggcctcgggttcctgccggtgcagatggtcgtcgaggaaggcagctttctcaaggtggccgtcgacagggagctggccaaagctgcttaaattaatatacctgaaccggcgagcatttaaattttcacacagctacgattttaattgatatatcttgtgttcacaatattgatcattgttatttgatagcctctgttgagctatatttcattgttacttgtgtaactgtgctctttgagatagacaaagataatatgatataaaaaaccagttttgatc

SEQ ID NO: 202 - protein, 138 aa, Oryza sativa
MSVEILDGKTVRSFVEDEGAFNSSVDGRFAALDANRDGLLSYTEMAGELMSLRVLEKHFGVDDEAAMGPDELVELYRGLFARFDRDGNGAVDLEEFRAEMKEMLLAVANGLGFLPVQMVVEEGSFLKVAVDRELAKAA

SEQ ID NO: 203 - DNA, 704 bp, Oryza sativa
aaattagccactccactccaagcaaaccgagtctcacttactctgagcttctctacacatccagtgctactccagtttaattagcatccgccaccatgagcgtggagatcctcgacggcaagacggtgcggagcttcgtggaggacgagggcgccttcaactcctcggtcgacggccgcttcgccgcgctcgacgccaaccgcgacggcgtgctctcctacgccgagatggccggggagctgatgagcctccgcgtgctggagaagcacttcggcgccgacgaagacgaggccgccatgggcgccgacgagctcgcggcgctgtaccgcgggctgttcgcgcggttcgaccgcgacggcagcggcggcgtcgacctggaggagttccgggcggagatgaaggaggtgttgctcgccgtcgccaacgggctagggttcttgccggtgcagatggtcgtcgaggaaggcagctttctcaaggtggccgtcgacagggagctcgccggagcagctgcctaaactgaactaattacagagcaaaaaaggagtttcatattttacacttccacgattttgttgtgattcattattctttttagataactagaaggccactctattgagtaatttcattgatacttaattacttatatatacacggaaggatacacggtgtaataatgcattagttttttcatgttattc

SEQ ID NO: 204 - protein, 140 aa, Oryza sativa
MSVEILDGKTVRSFVEDEGAFNSSVDGRFAALDANRDGVLSYAEMAGELMSLRVLEKHFGADEDEAAMGADELAALYRGLFARFDRDGSGGVDLEEFRAEMKEVLLAVANGLGFLPVQMVVEEGSFLKVAVDRELAGAAA

SEQ ID NO: 205 - DNA, 1195 bp, Oryza sativa
atcagccatggctgttgcactcgcgctcttggctgccatgtcggcgctctcgtcgtgcacaagtccggccaccgcagagctcacacggcacgagcacccggtggccgccggcgcgccgctgcgcctcctcgtcgtcggcgactggggccggaagggcggctacaaccagacaagagttgcagaacagatggggaaggttgcggaggagacggagatcgacttcgtcgtgtcaaccggcgacaacttcttggagaacggcctcgccggcgtcgacgacatggcgttccatgactccttcatggatgtctacacggctcagagcttgcacaagccatggtaccttgttcttggaaaccatgactacaggggaaatgtgctagcacagattgacccagctctgaggaagatcgacagcaggttcatctgcatgagatccttcattgtcagtgcaggaattgtcgatttcttctttgtcgacacgaccccgtttcagctccagtactggactgatcctggagaagatcactatgactggaggggagtcgcgcctcgggatgcgtacatcgccaatctcctcgaggatgttgatgctgcaatgaagaaatcaactgcaacatggaagatagctgtaggacatcataccatgaggagtgtgagtgcccatggagacacccaggagctccttgagcttctccttcctgtcctcaaggaaaacggtgtcgatttctacatcaatgggcatgatcactgcctggagcacatcagcagcagaaacagtccaattcagtacttcactagtggaggcggatcaaaggcatggagaggcatttttcaacaaaacgaagacaagctccagttcttctatgatggacaagggttcctgtcacttgagctcagtgagaaccgagctcgattcgccttctacgacgttttcggtgaagctttgtaccactggagcttcagcaaagctaatctgcagaaggttcagtcctctgctagtgtaactgaagaatgagagaagctggagccttcagaatacattcccacacagctgagtagatgtctacctgcataattctacttgtacaattatgtcacattgtgctcatcaatactggatttgctatgaattagcaagtgtttgattctactagagaaagatcacagaatgaagcaggtgtttttgcacgaagcc

SEQ ID NO: 206 - protein, 335 aa, Oryza sativa
MAVALALLAAMSALSSCTSPATAELTRHEHPVAAGAPLRLLVVGDWGRKGGYNQTRVAEQMGKVAEETEIDFVVSTGDNFLENGLAGVDDMAFHDSFMDVYTAQSLHKPWYLVLGNHDYRGNVLAQIDPALRKIDSRFICMRSFIVSAGIVDFFFVDTTPFQLQYWTDPGEDHYDWRGVAPRDAYIANLLEDVDAAMKKSTATWKIAVGHHTMRSVSAHGDTQELLELLLPVLKENGVDFYINGHDHCLEHISSRNSPIQYFTSGGGSKAWRGIFQQNEDKLQFFYDGQGFLSLELSENRARFAFYDVFGEALYHWSFSKANLQKVQSSASVTEE

SEQ ID NO: 207 - DNA, 2252 bp, Oryza sativa
gattctgaaaacttcagtctttctctcttcagcatctctactctcgctccatttctaagggatcgaaatgatggaggcgaaagacgggcaagcatggctggggacgaacggatacggcagcaggagggaggaagacggcgtgtgccacgacgacagcgcgacaccggtgagggcgaacactgtcgacgagctacactcgctgcagaggaagcctcaggtagtggaggatcgccacaggctgcagcttcagtccatcagtgcgtctttggcatcgatgacatgtgggattgggccaaaactcgtcaacggtgacccagcaaggaaaaaagaaatggctggcaaggctgtgacacatcaccaacaccatatcactgtccccacgatcactgtgagcgacagtgacctcaagttcacccatgttctgtacaacttatccccttctgaactttatgagcatgcaatcaaatatgagaaagggtcattcatcacatccagtggggcgttagcgacgctatcaggagcaaagaccggtcgatcacctagggacaagcgtgttgtcaaggatgaaacaacagatgatctgtggtggggcaagggatcaccaaacattgaaatggacgagcaaacctttctgatcaacagggagagagctgttgactacttgaactcccttgataaggtgtttgttaatgatcagttcctaaactgggaccccaacaataggataaaagttcgaatcatctctgcgagggcctaccattctctcttcatgcacaacatgtgcatccggccaacatacgaggaactagagaattttggcgagcccgacttcaccatctacaatgctggacagttcccgtgcaaccgttacacgcattacatgacatcgtcaactagcatagacttaaatcttaagcggagagaaatggtcatcctgggaacacaatatgctggagagatgaagaaaggcctcttcagtgtgatgcactacctcatgcccaaaaagcagatcctctcgttgcactctggctgcaacatgggcagagggggtgatgtagccctgttttttggattgtcaggtactggaaagacaactctgtcaacagacaggaataggatcttaattggtgatgatgaacactgctggagtgataatggtatctctaacattgagggcggctgctatgctaaatgcatagatctttctcaggagaaagaacctgacatttgggatgcaatcaagtttggcacagtgttggagaatgttgttttcgatgagcactcccgtgaagttgattatacagaaaaatctgtcacagagaatacccgtgctgcttaccctattgaatacatagctaatgctaagataccatgtgttgggccacacccaaaggatgttatcctacttgcatgtgatgcatttggtgtcctccctcctgtcagcaagttgagccatgcacaaaccatgtaccattttatcagtggctacactgcattggtcgctggaactgaagatggtatcaaggagccacaggctacattttctgcctgctttggtgcagcttttataatgctccacccaactcggtacgctgccatgctggcagataagatgaacaagcatggagctaccggatggcttgtcaacactggttggatcggggggagttatggtgtaggtgagcgaatcagcttggcctacacaaggaaaatcatcgatgccattcactcgggtgagcttttggctagaagctacaaaaagacagatgtctttggactagacatccccacaaaagtggaaggagttccatctgaattgcttgacccaataaatacctgggaagacaaagactcatacaagttgacacttctaaagctgtcagatctgttcaagagaaatttcaaggtatttgcaaattacaagaaaggtggtgttagtgatctggctgatgagattgctgctgcaggaccaaatttctgattttaattgaatagtagtagtatgtcttaatgtataccaaataaaagggatttttttatgttcctcgaggatgtatcgcaaggtaccacttattttagtgtaaatttttatacctcatggtacttctctagtgtaaagtaccaaaaagtatcataaattaacactaaaatatggtatctctcgttacctagtcttgtacggtaaaactgaacaaaatgcccattttgaggatggtgacatatatatattaaaagctatttcagagtgatgt

SEQ ID NO: 208 - protein, 637 aa, Oryza sativa
MMEAKDGQAWLGTNGYGSRREEDGVCHDDSATPVRANTVDELHSLQRKPQVVEDRHRLQLQSISASLASMTCGIGPKLVNGDPARKKEMAGKAVTHHQHHITVPTITVSDSDLKFTHVLYNLSPSELYEHAIKYEKGSFITSSGALATLSGAKTGRSPRDKRVVKDETTDDLWWGKGSPNIEMDEQTFLINRERAVDYLNSLDKVFVNDQFLNWDPNNRIKVRIISARAYHSLFMHNMCIRPTYEELENFGEPDFTIYNAGQFPCNRYTHYMTSSTSIDLNLKRREMVILGTQYAGEMKKGLFSVMHYLMPKKQILSLHSGCNMGRGGDVALFFGLSGTGKTTLSTDRNRILIGDDEHCWSDNGISNIEGGCYAKCIDLSQEKEPDIWDAIKFGTVLENVVFDEHSREVDYTEKSVTENTRAAYPIEYIANAKIPCVGPHPKDVILLACDAFGVLPPVSKLSHAQTMYHFISGYTALVAGTEDGIKEPQATFSACFGAAFIMLHPTRYAAMLADKMNKHGATGWLVNTGWIGGSYGVGERISLAYTRKIIDAIHSGELLARSYKKTDVFGLDIPTKVEGVPSELLDPINTWEDKDSYKLTLLKLSDLFKRNFKVFANYKKGGVSDLADEIAAAGPNF

SEQ ID NO: 209 - DNA, 1813 bp, Oryza sativa
taagtgtcattgatagacaactacaagagcttaatgaacggtttgatgaggtaaacacagatttgctcctttgtatggctgcatttagtcctatagataactttgctagttgggacaaagataagttgattaagcttgcacggttttatcctaatgatttctcaagcacagagatgaaccatcttccatcagcattgaaactcttcctcactgagatgcgtatagatgaaaggtttagaaaagtaaaaaatcttgctaatctttccattatgattgttgaaacaaaattgcacaatagacatgagattgtttacaagcttctcaaattggttctggtacttccagtagcaacagctagtgttgaaagaatattttctgccatgaattatgtgaagaataaattgagaaacaggatggggggtcaatacttgaatgattgcttggtcacatttattgagcgtgagatgtttttgaaagtcaaggagtgtgatattataaaccgctttcaagccatgaaggaacgcagaattaaagctactcttccaagccacgaaggaaccgaaatagaaaattagagacgggaatacccaactttcaaatcctggctccgccactgcttcatccgaacccaactccagtgctcggcttccagacggcagcaggagccatccatcctcatcagcccccacctccgccatgaccggccgaccaaattctccacccacatcagcttctaccagtgggagcaaggtgcctcctcccttgcgaggatcatggatgccaaggacttccctgtcggccacaagttccgcttaatcagccactacacccactgtgatggcctagtgctcgccccgactatcaccaagctctacctcttcaacccggcaacaagagaagccatcacgttgcctgacggccatggccacagccacaccgcagggctggggctggatcctggtaccggcaggtacaaggtggttcggtccttctaccgctccccctccatggatcctcccgtctccatggggatggaggtgctcaccgtcggcgagcccggcgcgcggtggagggagaccgccgttgatcctccacaccccatcacccgatggcggaccgcccttgccgtcaatggtggctacctgttctggtacatggacaggcgccgctaccccgacgatgctccccggggactcctccggttcagcctgcgagacgaggcgttcgccgtaacccgtctcccggaatcgatggacccgacgctcgacgagaacgtcttgcccgacgtgctgcacggggagctgtgcgtcgtgcaagctctgcccgacaaggctggggtgcttatctggacaatgtcgtcgtcgtccatggacaacgacgatgtccacctcgacgacgggccatgggaactgcgatattgcatctgtgtcaacgccctttgccatccgttgggggttcttcctgatggaggaggaatcttgttgtgggcgaatcgcagcgtccgtcgctacgacttctcggctaggaagctcgctggtgtggtgtgtaacctggatcgcatcaggtatcagggtggtaggccagcgagatggaagagtgtcgtcgacttcaccttgacgccctacaccgagtctctcgttagaattaccgctgcttagcttcttcggtcttgctactttttatcccatgagaatcagtttgtatgcactgcttgtatttccccccctctgtttatcactacaagtactcctgcaaatgacaaggctatttatttgaatgctctattattaatttattttactcccttcgtttc

SEQ ID NO: 210 - protein, 294 aa, Oryza sativa
MDAKDFPVGHKFRLISHYTHCDGLVLAPTITKLYLFNPATREAITLPDGHGHSHTAGLGLDPGTGRYKVVRSFYRSPSMDPPVSMGMEVLTVGEPGARWRETAVDPPHPITRWRTALAVNGGYLFWYMDRRRYPDDAPRGLLRFSLRDEAFAVTRLPESMDPTLDENVLPDVLHGELCVVQALPDKAGVLIWTMSSSSMDNDDVHLDDGPWELRYCICVNALCHPLGVLPDGGGILLWANRSVRRYDFSARKLAGVVCNLDRIRYQGGRPARWKSVVDFTLTPYTESLVRITAA

SEQ ID NO: 211 - DNA, 1317 bp, Oryza sativa
gactctcatcactgattacacccaacaacaacacaatccaaccatcaaccatactacaccagaacacaacaatggcgtcccaacgccggcgatcatccgccgccaccatcgccgtcttcttcttcctcctctccttgttagcggtgttcttccagccggccgccgcctactaccaccctcaggggaagaggcagaccgtcgccgtcttctggggacgcaacaaggccgagggctcgctccggcaaacctgcgacaccggcgactacaacatcgtcatcatctccttcctcagcgtcttcggccatggcaagtactggctcgacctctccggccacgacctccgagacgtcggcgccgacatccgccactgccagtccaagggcgtctacatgctcctctccatcggcggcgacggcgacggctactccctcccttcctccaagtccgccgccgacgtcgcctacaacctctaccactccttcctcggccgcccacgcgccggcatcttccgccccttcggcgacgacaccatcgtcaacggcgtcaacttcttcatcgaccacggccccggcgaccactacgacgacctcgccaaccgcatcaacgactacaaccagaacatccacgaccccatcggcatcatgctgacggcgacggtgaggtgctcgtaccctgacccgaggatgaagaaggcgctggacaccaagctgttcacgcagatccacgtgaggttctacgacgacccgaggtgctcgtacaaccacgcggggctcgccggcgtcatggcgcagtggaacaggtggtcggcgaggtacccaaacagccggatcttcctggggctcgcggcggcgaacgtgacggggaagaacgacatggtcggcgtcggggagctcagccggaagctgctgccggcggtgcagaagacggagagctacgcgggagtgacgctctggaacagctactacgactccaagactcactacggaagatatgtcaagcactgggcttaatttaatcaattaatttaagctcagatcaaccagctataataatctactacagtgcatgcagctcaatcactatcgcagtaatcacggtgtcatgggtttaatgtagtaaactacccccacttaattacatgttgtttgttgttttttgatcttggtctcgagagcaagtgttttttttatttgcacaactctagtgtgtcatatatgcatgtgtgatcgatgtatctgtacttttctttttcccttttttcctttttgcaactgtgtatgtattgatgtataatgaagttgtacatgatgtttaatg

SEQ ID NO: 212 - protein, 312 aa, Oryza sativa
MASQRRRSSAATIAVFFFLLSLLAVFFQPAAAYYHPQGKRQTVAVFWGRNKAEGSLRQTCDTGDYNIVIISFLSVFGHGKYWLDLSGHDLRDVGADIRHCQSKGVYMLLSIGGDGDGYSLPSSKSAADVAYNLYHSFLGRPRAGIFRPFGDDTIVNGVNFFIDHGPGDHYDDLANRINDYNQNIHDPIGIMLTATVRCSYPDPRMKKALDTKLFTQIHVRFYDDPRCSYNHAGLAGVMAQWNRWSARYPNSRIFLGLAAANVTGKNDMVGVGELSRKLLPAVQKTESYAGVTLWNSYYDSKTHYGRYVKHWA

SEQ ID NO: 213 - DNA, 1503 bp, Oryza sativa; identical to SEQ ID NO: 122

SEQ ID NO: 214 - protein, 452 aa, Oryza sativa; identical to SEQ ID NO: 123

SEQ ID NO: 215 - DNA, 1295 bp, Oryza sativa
gatcggactcggagcaaaacacaatagaggagcagagcagagcacagtgagctagtagcagaggccacactagcgttgagatggcgcgcgaggcggagaaggacgcggcggcggcggcggagatcccgctgctgacgccgtacaagatggggcggttcgagctctcccaccgtgtggtgctcgcgccgctcacgcggaaccgctcctacggcaacgtgctgtactacacgcagcgcgccaccagcggcggcctcctcgtcacggaggccaccggcgtctccgacaccgcgcagggctacccggacacccccggcatctggacgcagcagcaggtcgaggcgtggaagcccatcgtcgacgccgtccaccgcaagggcgccctcttcatctgccagctctggcacgtcggcagggtctccaccaacgaataccaacctgacgggcaggcgcccatctcaagcacagacaggcagatcacaccggacgattcaggcatcgtctactcgaaaccccgacggctgaggacggaggagatccctcagatcatcgacgacttcaggcgagccgcgcggaacgccatcgaggccgggttcgacggcgtggagatccacggcgcgcacggctacctcctggagcagttcatgaaggacagcgccaacgaccgcagcgacgagtacggtggcagcctcgagaaccggtgccgcttcgttgtcgaggtgatcgacgccatcgtcgccgaggttggagcgcaccgtgtggggatcaggctgtcaccgttcatcgactatatggactgcgtcgactccgacccggtggctctcggctcgtacatggtgcagcagctcaacaagcacccggggtttctctactgccacatggtggagccaagaatggccatcgtggaaggacgcaggaagatcacccatggcctcctgccattccggaagctgttcaatggcactttcatcgctgccggaggatacgatcgggaggaaggaaacaaggtgatagccgatggatatgctgacctcgtcgcctacgggaggcacttcttggccaatccggacttgcccaagaggttcgcgatcaacgcaccattgaacaagtataataggtccaccttttacatacaggatcctgttgttggctacacggactatcctttccttgatgagaaagacgagggcgctgctacttatgcttaatcctcaattaaattgtcaaattgaaatgttcggtttagtaatgtgcactatatttgtgatacactcataagtgaccctcacttccatccg

SEQ ID NO: 216 - protein, 374 aa, Oryza sativa
MAREAEKDAAAAAEIPLLTPYKMGRFELSHRVVLAPLTRNRSYGNVLYYTQRATSGGLLVTEATGVSDTAQGYPDTPGIWTQQQVEAWKPIVDAVHRKGALFICQLWHVGRVSTNEYQPDGQAPISSTDRQITPDDSGIVYSKPRRLRTEEIPQIIDDFRRAARNAIEAGFDGVEIHGAHGYLLEQFMKDSANDRSDEYGGSLENRCRFVVEVIDAIVAEVGAHRVGIRLSPFIDYMDCVDSDPVALGSYMVQQLNKHPGFLYCHMVEPRMAIVEGRRKITHGLLPFRKLFNGTFIAAGGYDREEGNKVIADGYADLVAYGRHFLANPDLPKRFAINAPLNKYNRSTFYIQDPVVGYTDYPFLDEKDEGAATYA

SEQ ID NO: 217 - DNA, 1560 bp, Oryza sativa; identical to SEQ ID NO: 58

SEQ ID NO: 218 - protein, 339 aa, Oryza sativa; identical to SEQ ID NO: 59

SEQ ID NO: 219 - DNA, 1019 bp, Oryza sativa
atgcaaatcacatacacataacgtgtgcgttgctgcaacatgaagatgaaggctctcctccccgtagccgccatgctgctcctcgtctccggccagctcgccgccccggtcaccgccgacggctacgtcggccagctcgccgtgttctggggccgccacaaggaggagggctcgttgcgcgaggcctgcgacaccggccgttacaacatcgtcgtcatcaccttctacaacgtcttcggctaccagcgcggcaggtacggcctcgacttctccggccacccggtcgccgccgtcggcgccgacatcaagcactgccagtccaagggcgtccaggtcctcctctccatcggcggccagggcggcgagtactcgctcccgtcctcccagtcggcctccgacgtcgccgataacctctggaacgcctacctcggcggccgccgcgccggcgtgccccgccccttcggcgacgccgtcgtggacggcatcgacttcttcatcgaccagggcggcgccgaccactacgagcagcttgcccggcagctgcacggccgcggcgtgctgctgacggcgacggtgaggtgcgcgtacccggacagccggatggaggcggcgctggcgacgggggtgttcgcgcgcatccatgtccggatcttcggcgacgaccagtgcaccatgttccccaaggacgcgtgggagaagtgggcggcggcgtacccgcggtgcacggtgttcctgacggtggtggcgtcgccggagcaggacgaggggtacatgttccagaaggatctctactacggcgtgcagcagttcatcgacaaggagcccaactacggagggatcgccatctgggacaggtactacgacaagaaagccaactacagtggtgagggctaatgcatcatgatcaatctctacctgctatatatctctctcaatatatgtaatgtaatgtaatgtaataatattcgaataaaatgaggtcacaaattatattataaatatggatcagacctcagatg

SEQ ID NO: 220 - protein, 284 aa, Oryza sativa
MKMKALLPVAAMLLLVSGQLAAPVTADGYVGQLAVFWGRHKEEGSLREACDTGRYNIVVITFYNVFGYQRGRYGLDFSGHPVAAVGADIKHCQSKGVQVLLSIGGQGGEYSLPSSQSASDVADNLWNAYLGGRRAGVPRPFGDAVVDGIDFFIDQGGADHYEQLARQLHGRGVLLTATVRCAYPDSRMEAALATGVFARIHVRIFGDDQCTMFPKDAWEKWAAAYPRCTVFLTVVASPEQDEGYMFQKDLYYGVQQFIDKEPNYGGIAIWDRYYDKKANYSGEG

SEQ ID NO: 221 - DNA, 1772 bp, Oryza sativa
acaagctccacattttcctcctctcttcttcttcttcctccgatcgacgattcgctctctcgctctcgctcgatttccgtttctttgattattgttgtcgagtgtaactgatccgccatggaggtggagttgccatggggcgcgcggtgcgcggcggcggcgttcttcgtgtcctcgctgtgcgtggcggcgctcggcgtcgtgctcctgctcctcaggcggtggccgtggtgcggctgccatgtctgccgcgcctacctggccgggtcgtggaggagggagttcgccaacctcggcgactggtacgccgacctgctccgccgctcgccgacgggcaccgtccacgtccacgtcctcggctgcaccgtcacggcgaacccggcgaacgtggagtacatgctcaagacgcgcttcgacaacttccccaaggggaggccgttcgccgcgctcctcggcgacctcctcggcgacggcatcttcaacgtcgacggcgacgcgtggcgccaccagcggaagatggccagcctcgagctggggagcgtcgccgtgagatcctacgcgtacaagatcgtcgcccaggaggtggaggcccgcctcatgccggtgctcgccaacgccgccgacagcggcgccgtggtcgacctgcaggacgtgttccgccgcttcgccttcgacaccatctgcaagatctccttcggcctcgacccgggctgcctcgaccgggagatgcccgtgtcggagctcgccgacgcgttcgacgccgcgtcgcggctgtccgccatgcgtggcgcggcggcgtcgccgttgctgtggaagatgaagcggtttctcaacgtcgggtcggagagggagctcaagaaggccatcaagctcatcgacgggctcgcggcggcgatgatccgggagcgccggaagcttggcgtcgcgaacagccacgacctcctgtcccggttcatggcctcctccggcgacgacgcgcgcggcgccgccgacgacaagttcctccgcgacatcgtcgtcagcttcctcctcgccggccgggacacggtgtcctccgcgctcaccactctgttcatgatcctgtccaagaaccccgacgtggcggccgccatgcgcgcggaggccggcgccgccgccggcgagagcgccgccgtcagctacgagcacctgaagcggctgaactacacccacgccgtgctgtacgagaacatgcggctgttcccgccggtgcagttcgactccaagttctgcgccgccgccgacgtgctccccgacggcacctacgtcgacggcggcgcgcgcgtcatgtaccacccctacgccatgggccgcatgccgcgcatctggggcgccgactgcgacgcgttccggccggagcggtggctcaccggcgccggcggcgcgttcgtgccggagagcctcttcaagtacccggtgttccaggccggcctccgcgtgtgcctcggcaaggagctcgccatcaccgagatgaaggcggtcagcgtcgccgtcgtgagggcattcgacgtcgaggtcgtcggcgagaatggccggtgcggcggcggcgccgccgccgcgccaagattcgtgccggggctcaccgcgtccatcagcggtgggctcccagtgaagatcagacgcgtttagacttgcacacagcatagtagacagacttctttttcattcactgtatcaacaaattggataagaaattaaataggcatgtacatagaacaaaaaagggagaaatcaatataccaaatttttcatct

SEQ ID NO: 222 - protein, 509 aa, Oryza sativa
MEVELPWGARCAAAAFFVSSLCVAALGVVLLLLRRWPWCGCHVCRAYLAGSWRREFANLGDWYADLLRRSPTGTVHVHVLGCTVTANPANVEYMLKTRFDNFPKGRPFAALLGDLLGDGIFNVDGDAWRHQRKMASLELGSVAVRSYAYKIVAQEVEARLMPVLANAADSGAVVDLQDVFRRFAFDTICKISFGLDPGCLDREMPVSELADAFDAASRLSAMRGAAASPLLWKMKRFLNVGSERELKKAIKLIDGLAAAMIRERRKLGVANSHDLLSRFMASSGDDARGAADDKFLRDIVVSFLLAGRDTVSSALTTLFMILSKNPDVAAAMRAEAGAAAGESAAVSYEHLKRLNYTHAVLYENMRLFPPVQFDSKFCAAADVLPDGTYVDGGARVMYHPYAMGRMPRIWGADCDAFRPERWLTGAGGAFVPESLFKYPVFQAGLRVCLGKELAITEMKAVSVAVVRAFDVEVVGENGRCGGGAAAAPRFVPGLTASISGGLPVKIRRV

SEQ ID NO: 223 - DNA, 1626 bp, Oryza sativa
gagacacttccacccatttgcaccgccatttcgaccggccggggcagtagtgtactacgtatactgtatacagttcccgatcgacgcgtgcatggcggcgagccttctgtcccacgtcgtgtccgatctctgcatcggcaagccgccggcgcgcgtgctgccgccgtccactcccgtcgcggccgccctcgccgcgctccgcaccggagatgaccccttcgtcttcgtcgtcgacgctgatgaggcgctccgccactcccgcgggaagaagatcgccgcggggtgcgtcgtcgtcaaggttagcgtcgcggacgtgctctgctacgtgtgcggcgacgcggacaacctcagcgaccccgcggccgcgctcggccggcccgtgtccgcgctcgcggcggccgtgcacgctggtggtggcgatcatcacggcgccgccctccgcgtcgactcgctcacaaggtacgcacgtgacagccggcgccgccgctgttaattccgctgttgattcatcagccgtggaatgccacgacgcaaaccgggaatcgaattgaactgtgtgtgatctggtccaactttgcagcctgctcgacgccattgacgcgctgctgagcaacgacgctcagaccctgctcgtcccgctccacgcgcacgccgcccgcagcaggaagcaccaccacgtacacgtctccggctgctccccggccaaccccgccgccgccactgactactgcgtgctgacgcgggaagacatcgtccgccacctcttcagctactccatctccctgttcgcccccgtcgcggcgcgcaccgtcgcctccctcggcctcgtccgccgggacgtgcacgccgtgcacgcagacgacgacgcgctcgacgccatcccgctcctgcggagatccatcgcggacggcaccgccgtggccgtcgtcgccgatgacgacgccctggtcggcgagatctgccccggagttctcggctcgtgcgacatcgagtcggcgtccgcggccttcgccgcgctctccgccggcgacgtcatgacgtacatagactgctcgttgtctccgccggagttcttgcttcgctccatcagggcgcagctcaagggcaggggcatggacgccatggccgacctcatggacgccgcggacgacgctgcctcgtctctgccgttatccccatcgtcttcctcgtcggcatcgtccgacgaggactcaccttttgggcgtgcgcggcgcgcaaggaggtcgtcgtcgggaagcttcaggtggaggtcgacgaaggacgtcgccgcatgccatgctgggagctcgctggtggcagtcatggcgcaggctcttgcgcaccgagtcgggtacgtctgggtcgtcgacgaggtcagcggcgcgctaaccggagtcgtgagcttcggagatgtacttgcggtgctccgggagcatctccgtgatggtgatacgcagatgaactgacgaattagcagttcatttgcagttttgcacatgtgcaagtgtaaattacacgagacatgagataaatttggcccatgagccacggacttccttttctcgagtccagcccgtaaaagagcatttaggcccaaacctaacaagaacttgcagttctgctacc

SEQ ID NO: 224 - protein, 143 aa, Oryza sativa
MTYIDCSLSPPEFLLRSIRAQLKGRGMDAMADLMDAADDAASSLPLSPSSSSSASSDEDSPFGRARRARRSSSGSFRWRSTKDVAACHAGSSLVAVMAQALAHRVGYVWVVDEVSGALTGVVSFGDVLAVLREHLRDGDTQMN

SEQ ID NO: 225 - DNA, 1407 bp, Oryza sativa
tgaattctcgctcgtgagtcgtgacagtagaagagctatcagagtatcagtagaaaaatcttagcatcgatcatggcatcgccaccctcgctgctgcccagcgccggcgaggacgacgaatcccagcgagaagtttacgagcagctccgccagctcgtgtcgacctacccgaccgtgccgagcggcctcgacaccccgtactaccgccaccccgacggctggtacacgttcttgccggcgatggtcagcgtcatggtggcgcagcgccacttcaccgcccgcgacaccgacatcatcatcgccaccttccccaagtgtggcaccacctggctcaaggcgctcctcttcgcgaccgtccaccgcgacggcggcggcgccggcggcgtggaggacgacgcggcgctcgcgcagctcagggcgcggaacccgcaccagctcgtcccgttcctcgagatccaggtgtacgtgcgcgacagggcgcccgacctgagctccctcccggcgccacggctcctcgcgacgcacatcccgcgcccgtccctgccggcctccgtcgccatctccggctgcaaggtggtgtacatgtgccgcgaccccaaggactgccccgtgtcgctgtggcacttcctggacgcgcagcggccggagccacgcggcgacgtcggcgaggacttccgcctcttctgcgacggcgtgtcgctggtcgggccgtactgggaccacgtgctggcttactggcggtggcacgtcgagcggccggggcaggtgctgttcatgacgtacgaggagctgagcggcgacacgctggggcagctgcgccgcctcgcggagttcgtcggccggccgttcaccggcgaggagcgggcggcccgggtggacgaggcgatcgtgaaggcgtgcagcttcgagagcctagcgggcgcggaggtgaacaggtcagggacgattgagctgatggaggagccgatgcggaacgccgagttcttccggcgaggcgtcgtcgggggctggccgaactacctgtcgccggagatggccacaaggatcgacgagattaccgagagcaagttcagaggctctggactggtgttgcccacgatgatgaccatgtaataagtacagtacattttgcaatattgttacaaccactggtggagaaatatttttagtcacggttcgcaaccccctgtagtcccggttaaccaggactaccaatccgggactaaaaatcgctatctttattcccggttcaaatacccggaactaaaaatagatctttagtcccggttagcaacaccaatcgggactaaagagaggggccaacgggactaaagagagggttgcggtagtgagatgatcccctttttcttttttattttctcccaaatcaagtgggagacatatctc

SEQ ID NO: 226 - protein, 346 aa, Oryza sativa
MASPPSLLPSAGEDDESQREVYEQLRQLVSTYPTVPSGLDTPYYRHPDGWYTFLPAMVSVMVAQRHFTARDTDIIIATFPKCGTTWLKALLFATVHRDGGGAGGVEDDAALAQLRARNPHQLVPFLEIQVYVRDRAPDLSSLPAPRLLATHIPRPSLPASVAISGCKVVYMCRDPKDCPVSLWHFLDAQRPEPRGDVGEDFRLFCDGVSLVGPYWDHVLAYWRWHVERPGQVLFMTYEELSGDTLGQLRRLAEFVGRPFTGEERAARVDEAIVKACSFESLAGAEVNRSGTIELMEEPMRNAEFFRRGVVGGWPNYLSPEMATRIDEITESKFRGSGLVLPTMMTM

SEQ ID NO: 227 - DNA, 1205 bp, Oryza sativa
aaaacacactgcaaacattacggtatctcttgcgttgatgtcttggtgatcgacaggatgcaaggggaacaccatgaccatgtccctgtctacgagtcaggcaccgaggtgttccaaaagcttcaggagaaatggaattccaccaagcacaagcgataccgcgcgatgtactccagcgtcgtcggcggaatcatcctcgatccatcgatgatggtcatccccatcgacgatcacatggtccacagaggccatggcgtcttcgacaccgccatgctttccgacgggtacctgtatgagctggattcgcacttggatcggctgctgctatctgcatccaaagcaaagatcagctccccattctcccgcgaaacacttcgcgccattttggtgcagatgacggctgcgtccaagtgcaggaatggctcgatcaagtactggctcagcgccggccccggcgacttcctcctctcgccaaagggctgcactgcgccggcgttctacgccgtcgtcatcgcgtccgccaccgccgccgccgccggcgggcacccgcggctcagggagggcgtgagggcgatcacgtcgacggtgccgatgaaggacccgttcttcgcggcgatgaagagcgtcaactacctggcgaacgcgctggccatggcggaggcagaggagcgcggcgcgtacgcgtcggtgtgggtggacggcgacgggggcgtggcggagggcccgatgatgaacgtggcgttcgtcacgggcggcggcgacctggtggtgccggcgttcgacagggtcctcagcgggtgcacggcgaggcggctgctcgcgctggcgcccaggctggtggacgccggcgtgctcaggagcgtcggcgcggcgaggatctccgccgccgacgcgaggaggtgcgccgagatgatgttcgtcggcagcggcctcccgttgctgcccatcgtcgaatgggacggccagccggttggcgatggtcaagtggggaaaattgcccttgccctatctgacatgctttgcgaagacatcaaggccggtctcgacagagtacttgttccttatgatcaagcgagctagacgacgactaatagagctttggaagatcaactttgtataataataataataatgtaatacttccatttatgtgaacgaaatttttccgtattatgagtggaggatccgtcacattgacagaattg

SEQ ID NO: 228 - protein, 340 aa, Oryza sativa
MQGEHHDHVPVYESGTEVFQKLQEKWNSTKHKRYRAMYSSVVGGIILDPSMMVIPIDDHMVHRGHGVFDTAMLSDGYLYELDSHLDRLLLSASKAKISSPFSRETLRAILVQMTAASKCRNGSIKYWLSAGPGDFLLSPKGCTAPAFYAVVIASATAAAAGGHPRLREGVRAITSTVPMKDPFFAAMKSVNYLANALAMAEAEERGAYASVWVDGDGGVAEGPMMNVAFVTGGGDLVVPAFDRVLSGCTARRLLALAPRLVDAGVLRSVGAARISAADARRCAEMMFVGSGLPLLPIVEWDGQPVGDGQVGKIALALSDMLCEDIKAGLDRVLVPYDQAS

SEQ ID NO: 229 - DNA, 1317 bp, Oryza sativa; identical to SEQ ID NO: 211

SEQ ID NO: 230 - protein, 312 aa, Oryza sativa; identical to SEQ ID NO: 212

SEQ ID NO: 231 - DNA, 1669 bp, Oryza sativa
accgtcgtccacctccacggcgccgcccaggcccccgattccgacggccacgccttcgcctggttcacccgggacttcgccgagaacggcagcacatggacgcagaagacctacacctaccccaacgtgcagccggcggccggcaacatctggtaccacgaccacgccctcggcctcactcgcgccagcctcctcgccggcctcctcgccgcctacatcgtcgagtggcccgagctcgagatgcccttcaacctcccctccggcgagttcgacctccacctcgtcatcgccgaccgcaagttcaacgtcgacggcaccatcttcatggacaccgtcggcgccgtgccatccgtccacccgcagtggcagccggagtacttcggcgaggtcatcaccgtcaacggcaaggcgtggccgttccaagccgtccagcgccgccgctaccgcctccgcatcctcaacgccagcaacgcgaggtacctcaacatcaggttctccaatggtctccccctcaccgtcatcgcctccgacgcgacgtacctctcccgcccggtcaccgtctccaacctcctcctctccccggccgagatcttcgacgtcatcgtcgacttctccctcgtggtgaaccccaacgccaccgacatcgagttgctcaactcggcgccctacccgttccccaccggcactccggcgaacgcgacactcgacggcaaggtgatggcgttcaatgtctccgccaagtggcaggtcggcgacgacatgccgatgcaggagccggaaaactcgacggtggtgccggagatcggtgtgccgttcgcgaaggtgacggcgctgccgccgacgatgaagacgaggtacatcgtcctgtacgagaacatgacgagcaacgacccgaacaccgccaagacgatgaacctctacatcaacgggctccggctggaggatccgccgacggagacgccgatatcggggacgacggagctgtggcacgtgatcaacctcacccccgacaaccacccgctgcacctccacctcgccgagttccaggccgtccagatgctgcagctcgtcgacccggacaccttcaagagctgcatgctgaagcacaacgacaccttcgcctgcaacctcgaccagcacgccgtcggggccctgcagccggtgccggaggaggagaagacgtggaagaacgtcgtgaagatcccgccggcgtacgtcacgtcggtggtggtggcgttcaggctcgtccacaacaacatgccctaccccttcgacgccacggcggcgccgggatacgtctatcactgccacatcctggatcacgaagacaacgccatgatcaggccactcacgctgcttccatgaacaagactgcacactgtacgtggtggttgatgcatgaggagatcaagatgcctcaccaggattaaaaattatgagcatttctgtttgggtgaaagttaattatcgcgttatccaagttattttactatagttgtcaacccgtgcatttgtatgggggtatttgttacatgttggtggccatgcatggttgtctccattcggataggatagcctatgctttgtgcctttgttgtacgtttgccttgtgatcccttcccttaataaaatttggccggagttcctccgccggccgacctgccgattc

SEQ ID NO: 232 - protein, 444 aa, Oryza sativa
MDAEDLHLPQRAAGGRQHLVPRPRPRPHSRQPPRRPPRRLHRRVARARDALQPPLRRVRPPPRHRRPQVQRRRHHLHGHRRRRAIRPPAVAAGVLRRGHHRQRQGVAVPSRPAPPLPPPHPQRQQREVPQHQVLQWSPPHRHRLRRDVPLPPGHRLQPPPLPGRDLRRHRRLLPRGEPQRHRHRVAQLGALPVPHRHSGERDTRRQGDGVQCLRQVAGRRRHADAGAGKLDGGAGDRCAVREGDGAAADDEDEVHRPVREHDEQRPEHRQDDEPLHQRAPAGGSADGDADIGDDGAVARDQPHPRQPPAAPPPRRVPGRPDAAARRPGHLQELHAEAQRHLRLQPRPARRRGPAAGAGGGEDVEERREDPAGVRHVGGGGVQARPQQHALPLRRHGGAGIRLSLPHPGSRRQRHDQATHAASMNKTAHCTWWLMHEEIKMPHQD

SEQ ID NO: 233 - DNA, 1513 bp, Oryza sativa
gattccaatccaaaagtataatcaagcaaagcagctcgatcgagtgttcgactgatcaccagttggagctaatcgatcgagagagagagtatgacggtggaagtggaggcggtgacgatggcgaaggaggagcagccggaggaggaggaggtgatcgagaagttggttgagaagatcaccgggctggcggcggccatcggcaagctgccgtcgctgagcccgtcgccggaggtgaacgcgctgttcacggagctggtgatgacctgcatcccgcccagcagcgtggacgtggagcagctgggggcggaggcgcaggacatgcgcggccgcctcatccgcctctgcgccgacgccgagggccacctcgaggcgcactactccgacgtcctcgccgcccacgacaacccgctcgaccacctcgccctcttcccctacttcaacaactacatccagctcgcccagctcgagtacgccctcctcgcccgccacctccccgccgccccgccgccctcccgcctcgccttcctcggctccggcccgctcccgctcagctccctcgtcctcgccgcccgccacctccccgccgcctccttccacaactacgacatctgcgccgacgccaaccgccgcgccagccgcctcgtccgcgccgaccgcgacctgtccgcgcgcatggccttccacacctccgacgtcgcccacgtcaccaccgacctcgccgcctacgacgtcgtgttcctggcggcgctggtgggtatggccgccgaggagaaggcgcgcatggtggagcacctcgggaagcacatggcgcccggcgccgccctggtggtgcggagcgcgcacggcgcccggggattcctgtaccccgtggtggacccggaggagatccgccgcggcggcttcgacgtgctcgccgtgcaccacccggagggcgaggtgatcaactccgtcatcatcgcgcgcaagccgcccgtggcggcgccggcgttggggggaggagacgcgcacgcgcacggccatggcgccgtggtgagccgtccatgccagcgctgcgagatggaggcgagggcgcaccagaagatggaggacatgtccgccatggagaagctgccctcctcgtaggcaggcatcgatgactgcttccatcgcttgctacctcaccagctcacctgataaatcacctcagttactatcgattaatcatttaccatgcattaattaagaagaaaacatatataccataattatctaccagtaaaacaaatctaatagtagtatttaataatctcgttggtaattaactgcagtcatgcatgaatgcatgccatattgcgtcgctatctttttttcccatgatgagactgatgagagagagagagaatatatgtcgctattgagtgttactgcttgattactgtactagtagcttattacaatcaaccattgtctctgttgcgtatttatgagtgtaagtggttaattttctgttgcagcataattaagttacctgtat

SEQ ID NO: 234 - protein, 343 aa, Oryza sativa
MTVEVEAVTMAKEEQPEEEEVIEKLVEKITGLAAAIGKLPSLSPSPEVNALFTELVMTCIPPSSVDVEQLGAEAQDMRGRLIRLCADAEGHLEAHYSDVLAAHDNPLDHLALFPYFNNYIQLAQLEYALLARHLPAAPPPSRLAFLGSGPLPLSSLVLAARHLPAASFHNYDICADANRRASRLVRADRDLSARMAFHTSDVAHVTTDLAAYDVVFLAALVGMAAEEKARMVEHLGKHMAPGAALVVRSAHGARGFLYPVVDPEEIRRGGFDVLAVHHPEGEVINSVIIARKPPVAAPALGGGDAHAHGHGAVVSRPCQRCEMEARAHQKMEDMSAMEKLPSS

SEQ ID NO: 235 - DNA, 885 bp, Oryza sativa
gactcgtcagcttagagcaccgcaagcgcgcacagccagcaaagatgtgtggcggcgcgatcatttccgacttcatcccgcagcgggaagcccaccgcgcggccaccggcagcaagcgtgccctctgcgcctccgacttctggccgtcggcgtcgcaggaagccgccgacttcgaccacctcaccgccccctgcaccttcacccccgaccaagcggcagaggagccgaccaagaagcgggagcggaagacgctgtaccgtggcatcaggcggcggccgtgggggaagtgggcggcggagatccgcgacccggcgaagggcgcgcgcgtctggctcggcaccttcgccaccgccgaggcggcggcccgcgcctacgactgcgccgcccgccgcatccgcggggccaaggccaaggtcaacttccccaacgaggacccgccactcgacgacccggccgccgacggccacagccacggcggcgccgccatcccgtgcagggagttcatggactacgacgccgtcatggcgggcttcttccaccagccctacgtcgtcgccgacggcgtgccggccgtgccggcggaggaggcgcccacggtggcgtacgtgcaccaccacctgccgccgcagccgcagcaggacgcggggctggagctctggagctttgataacatccacacggccgtgccgatgtgagatcgatctgatgatcattcagatcgatgctagctcatgtgttttttaattatatcttcacagcagaaacaaaaaaaagttcaattcagtttattttgttgttatacgttttaaaatgtttcattaggttttcatgttataggagtgatttatcggattgaactctcaagtgaccgacttctgagttctt

SEQ ID NO: 236 - protein, 216 aa, Oryza sativa
MCGGAIISDFIPQREAHRAATGSKRALCASDFWPSASQEAADFDHLTAPCTFTPDQAAEEPTKKRERKTLYRGIRRRPWGKWAAEIRDPAKGARVWLGTFATAEAAARAYDCAARRIRGAKAKVNFPNEDPPLDDPAADGHSHGGAAIPCREFMDYDAVMAGFFHQPYVVADGVPAVPAEEAPTVAYVHHHLPPQPQQDAGLELWSFDNIHTAVPM

SEQ ID NO: 237 - DNA, 1428 bp, Oryza sativa; identical to SEQ ID NO: 162

SEQ ID NO: 238 - protein, 338 aa, Oryza sativa; identical to SEQ ID NO: 163

SEQ ID NO: 239 - DNA, 1329 bp, Oryza sativa; identical to SEQ ID NO: 179

SEQ ID NO: 240 - protein, 379 aa, Oryza sativa; identical to SEQ ID NO: 180

SEQ ID NO: 241 - DNA, 1111 bp, Oryza sativa
gacgggaaggtttcgtcctcgtttcgtttcttgcagcaggaagccaaagtgtatttcccgagctttgatgtgagctagctgattttgctagagctacaacatggccggtagtagcgagcagcagctggtcgccaacgcggcggcgacgacggtggccgggaacgggagcaggttcgcggtgacgtgtggcttgctcaggcagtacatgaaggagcacagtggaagcaacggcggcggtggcttcttgccggcggtgacggccatgagcctcatgaccggcggcgctgatgcggaggaggaggcgccggaggtgaggaagaccatggagctcttccctcagcaggctgggacgctgaaagacacgcaagaaaggaaggagatcaccgagaaggcgcagctgaccatcttctacggcgggagcgtggtggtgttcgacgatttccccgccgagaaggccggcgagctgatgaaactcgccggctcccgcgacagcacggcggcggcggccgtctcagacgccggcgccgcagcggggcagccttgcctaccagacatgcccatcgcgaggaaggtgtcgctgcagaggttcctggagaagaggaagaacaggatcgtcgtggcggagccactgccggagtcggagaagaaggaggcggagtcgagcaagcgtgccaagaaagacgatggcggcgcgtcgtggctccaggtgaaccccactctcagcctgtgagccgaagaaactgaagatagctggatcaaacaaggaaaaattaattactactactagtagtactgtattgatttaccatttgatttccacgtgtctgtggaaagtgtggaaccgtgtattattgatcgtttttccccatttcttactattttgcaacagttgttggtttcttccgggggaattagtagctaggtagcagctatgattggttaaattaatctgtcagcttatctgtttgtttgagaattctttgattatttgaagaattctttcatgcatgctgatcttatatgtaaggatccatgcacacggattgatgcctgtcggacctatggcttgtaaatccaaataaaatggtcaacaaatggtattatcctcttc

SEQ ID NO: 242 - protein, 209 aa, Oryza sativa
MAGSSEQQLVANAAATTVAGNGSRFAVTCGLLRQYMKEHSGSNGGGGFLPAVTAMSLMTGGADAEEEAPEVRKTMELFPQQAGTLKDTQERKEITEKAQLTIFYGGSVVVFDDFPAEKAGELMKLAGSRDSTAAAAVSDAGAAAGQPCLPDMPIARKVSLQRFLEKRKNRIVVAEPLPESEKKEAESSKRAKKDDGGASWLQVNPTLSL

SEQ ID NO: 243 - DNA, 1152 bp, Oryza sativa
gacacctcgatcagtagctccatcgtaagatcgattcgaccaacatatcaacaatggcgcttcgacgcctcgcggcacttctctccttggcagtactactgtccgccggcctcgccgccgtgtcggcgacgtcccagaacaccggcgacaccgtgatcatctggggccggaacaaggacgagggctccctcagggaggcctgcgacgccggccgctataccaccgtcatcatctccttcctcagcgccttcggctacatcccgggcacctacaagctcgacatctccggccaccaggtctccgccgtcggccccgacatcaagtactgccagtccaagggtaaactcatcctcctcgccatcggcggccagggcggcgagtactccctcccgtcctcccaggcggccgtcgatctgcacgaccacctctggtactcctacctcggcggccgccgcaatggcgtctaccgcccgttcggcgacgccaacgtgaacggcatcgacttcttcatcgaccagggcgcgagggagcactacaacgagctggccaagatgctctacgaccacaacaaggactaccgcgccacggtcggcgtgatggtgacggcgacgacgcggtgcggctacccggaccaccggctggacgaggcgctggcgacggggctcttccaccgcatccacgtcaagatgttcagcgacggccggtgcccggcatggtccaggaggcagtcgttcgagaagtgggcaaagacgtacccgcagagccgtgtcctgatcggcgtcgtggcctcgccggacgtggacaaggacgcctacatgccgccggaggccctcaacaacctgctgcagttcatcaacaagcagcccaacttcggaggcgtcatggtttgggacaggttctacgacaagaagaccggcttcacggctcacctgtgagtgtgtgactggtcgtgacatttgaagaccattaattccttaatattggatcaataaaagctttgtgtgcagtacttgtgtactacacaaataaagtcatgtaatgaaaataaacatatattgtgtctgctataaagatttgtatgttgggtaatgtatgtaatcaataaataaagcgaggtacggtacctcgggtgaaataataaagagctttgag

SEQ ID NO: 244 - protein, 293 aa, Oryza sativa
MALRRLAALLSLAVLLSAGLAAVSATSQNTGDTVIIWGRNKDEGSLREACDAGRYTTVIISFLSAFGYIPGTYKLDISGHQVSAVGPDIKYCQSKGKLILLAIGGQGGEYSLPSSQAAVDLHDHLWYSYLGGRRNGVYRPFGDANVNGIDFFIDQGAREHYNELAKMLYDHNKDYRATVGVMVTATTRCGYPDHRLDEALATGLFHRIHVKMFSDGRCPAWSRRQSFEKWAKTYPQSRVLIGVVASPDVDKDAYMPPEALNNLLQFINKQPNFGGVMVWDRFYDKKTGFTAHL

SEQ ID NO: 245 - DNA, 998 bp, Oryza sativa
gaccacgcgtccgacaaaacctcatctagagcatcgagctgagaggtaaggaagagaagaaaacaatggcggggaaagacgacgacgtgaaggtgctcggcgtggtggtgagcccgttcgcgatccgcgtgcgcatcgcgctcaacatcaagggcgtgagctacgagtacgtcgaggaggacatcttcaacaagagcgagctcctcctcacctccaacccggtgcacaagaaggtccccgtgctcatccacggcggcaagcccatctccgagtcgctcgtcatcgtgcagtacgtcgacgaggtctgggccgcggcgccatccgtcctccccgccgacccctacgaccgcgccgtcgcccgcttctgggccgcctacgtcgacaacaacatgttccctggaatggctggcgttcttttcgcggcgacggaggaggagagggcggcgaaggccgaggagacgctggcggcgttggcgcagctggagaaggcgttcgcggagtgcgcgggcgggaaggcgttcttcggcggcgactccatcgggtacgtcgacctcgcgctcgggagcaacctgcactggttcgaggcgctccgcaggttgttcggcgtggcgctgctggacgccggcaagaccccgctcctggcggcgtgggcgaagcggttcgtggaggccgaggcggccaagggggtggtgccggacgctggtgtggcggtggagctcggcaagaagctgcaggctcgtgcagcagcggcttccaccgctgcctgagtggcttggaataattattcgtttcggatggatcaaatcgatgggttcatgtgaagataaaaccgtgcgttatattagagtgccatttgaagtcttgtttagttcatttgtggggctattatgtaaagtctaagcatgcgtgcgtgtgtatatatatgtatgctctctgattcatcgatcatttgcagatatacagtgctattgttgtgttaaaaaaaaaaaaaaaaaaaa

SEQ ID NO: 246 - protein, 233 aa, Oryza sativa
MAGKDDDVKVLGVVVSPFAIRVRIALNIKGVSYEYVEEDIFNKSELLLTSNPVHKKVPVLIHGGKPISESLVIVQYVDEVWAAAPSVLPADPYDRAVARFWAAYVDNNMFPGMAGVLFAATEEERAAKAEETLAALAQLEKAFAECAGGKAFFGGDSIGYVDLALGSNLHWFEALRRLFGVALLDAGKTPLLAAWAKRFVEAEAAKGVVPDAGVAVELGKKLQARAAAASTAA

SEQ ID NO: 247 - DNA, 2025 bp, Oryza sativa
atggaagccgccgctcccgagatagagaggtgcgacgccggcgacgtggagtcggaccacgacggcgccgccgccgccgccgagcgcgtgccgccgtggcgcgagcaggtgacggcgcggggcatggtggcggcgctgctcatcggattcgtctacaccgtcatcatcatgaagctggcgctcaccacggggatcatccccacgctcaacgtctccgccgcgctcctcgccttcctcgcgctccgcggctggacgcgcgcgcccgccctcctcctccccggcggcggcgccgcctcctcctcctcccggcgccgccccttcacccgccaggagaacaccgttgtccagacctgcgccgtcgcctgctacaccatgggattcggcggtgggttcgggtcgtcgctgctggctctgaacaggaagacgtacgagttggccggggtgagcacgccgggcaactcgccggggagctacaaggagcccggggtcgggtggatgaccggattcctgtttgcgattagcttcgttgggctccttaacttgcttccactcagaaaggctttgatcatagattataagttaacctatccaagtgggactgcaactgctgttcttataaacggattccatacccctcaaggagaaaatagtgcaaagaagcaagtccgcggatttctgaattgctttgggatcagcctcttatggagcttcttccagtggttctacactggtggagagagttgtgggtttcttcaattccctacctttggtctaaaggcttggaaacaaacgttctattttgatttcagcctcacatatgttggtgcgggaatgatctgctcacaccttgtaaacctctccgcgctctttggcgcaatactttcttgggggataatgtggccactgatcagcatacaaaagggtaagtggtatcctggaaatgttcctgaaagcagcatgacaagcttgtttggttacaagtccttcatgtgtgtagctttgatcatgggggatggcctttaccacttcataaaagtaacaggtatcactgctaagagcctgcatgaacgatccaatcgtagacatgctaagaaagcgacagatgaggatacatttgtaattgctgatatgcagcgtgacgagttcttcaacaaagactatattccaaactggctagcgtatgctggatatgccttactgagcattgttgcggtaattgcgatacccataatgttccaacaggtgaagtggtactatgttgttgtagcctttgtgcttgctcctgtgctgggattctccaatgcctatggaactgggctaactgacatgaacatgagctacaactatggcaagattgctctcttcatctttgcagcttggggagggagggacaacggtgtcattgctggtcttgttggttgtggaatagtgaagcagctagtacaagtctctgctgatttgatgcacgactttaagactggtcatctgacattaacatcaccaagatccatgcttgttgggcaggccattggtacagccatgggctgcataatcgctccactgactttcttgctcttctacaaagcatttgatattgggaaccctgatggatactggaaggctccatatgccctgatatttcgaaacatggccattcttggcgtcgagggcttttctgcactaccaaagcattgtcttgagctgtctgctggcttctttgcattttctgtgctcatcaaccttatgagggacttcttgccacgcaagtacagggattatgtgcccctgccgacggcaatggctgtgccattccttgttggtgcaaattttgctattgacatgtgtgtgggaagcctgatagtctttgcctggcacaagatcaacagcaaggagtctgcgttgctagtgccagcggttgcgtctggttttatttgtggagatggtatatggatgttcccttcttccctgctttcccttgctaaggttaagccaccaatctgcatgaagttcactcccggaagctag

SEQ ID NO: 248 - protein, 674 aa, Oryza sativa
MEAAAPEIERCDAGDVESDHDGAAAAAERVPPWREQVTARGMVAALLIGFVYTVIIMKLALTTGIIPTLNVSAALLAFLALRGWTRAPALLLPGGGAASSSSRRRPFTRQENTVVQTCAVACYTMGFGGGFGSSLLALNRKTYELAGVSTPGNSPGSYKEPGVGWMTGFLFAISFVGLLNLLPLRKALIIDYKLTYPSGTATAVLINGFHTPQGENSAKKQVRGFLNCFGISLLWSFFQWFYTGGESCGFLQFPTFGLKAWKQTFYFDFSLTYVGAGMICSHLVNLSALFGAILSWGIMWPLISIQKGKWYPGNVPESSMTSLFGYKSFMCVALIMGDGLYHFIKVTGITAKSLHERSNRRHAKKATDEDTFVIADMQRDEFFNKDYIPNWLAYAGYALLSIVAVIAIPIMFQQVKWYYVVVAFVLAPVLGFSNAYGTGLTDMNMSYNYGKIALFIFAAWGGRDNGVIAGLVGCGIVKQLVQVSADLMHDFKTGHLTLTSPRSMLVGQAIGTAMGCIIAPLTFLLFYKAFDIGNPDGYWKAPYALIFRNMAILGVEGFSALPKHCLELSAGFFAFSVLINLMRDFLPRKYRDYVPLPTAMAVPFLVGANFAIDMCVGSLIVFAWHKINSKESALLVPAVASGFICGDGIWMFPSSLLSLAKVKPPICMKFTPGS

SEQ ID NO: 249 - DNA, 2022 bp, Oryza sativa; identical to SEQ ID NO: 158

SEQ ID NO: 250 - protein, 616 aa, Oryza sativa; identical to SEQ ID NO: 159

SEQ ID NO: 251 - DNA, 1757 bp, Oryza sativa; identical to SEQ ID NO: 191

SEQ ID NO: 252 - protein, 534 aa, Oryza sativa; identical to SEQ ID NO: 192

SEQ ID NO: 253 - DNA, 987 bp, Oryza sativa
gacaggcagctgcagctagctagctaagcttggataacagtgcaagggcgccggacggctacttggtccatggcgtctctgacgatcgtcgtcgccaccatcttcctgctcagcctcacctcggcgagcgtcgccgtccatggccggagcagcaggaggaggttcgtcaggagctacgacgagccgtgcatggagatgaggctgtacctccacgacatcctctacgactacagcaacagcacctccaactccacggcggcggcggccaccaagccgacggcgctggccaacgccgtgccgtcgaccggcggcaccttcttcggcgaggtggtggtgttcaacgacccggtgacggaggggagggcgctgccgccgtcgctggaggagacggcggtgagggcgcaggggctctacctctacaacagcaaggaggcgttcaacgcgtggctcgccttctccatcgtgttcaactccacggggcgccgcggcacgctcaacctcatgggcgccgacatcatcgccgagaagacgagggacatctccgtcgtgggcggcaccggcgacttcttcatgtcgcgcggcgtcgccaccctccgcaccgacgctttcgagggcttcacctacttcaggctgcagatggacatcaagctctacgagtgctacgtatgatgcatccatccatggtcgtataatatatactccatccgttctaaaatataagtatttttagctatgaacgcttatattttaagacggagggagtaccaaacactattcattattgtcgatgcaaatttcagtgaagatgtgacatctttggtcagggagacaaatgatcagccaattgacaaggtgatctgatgctcctagcttcgtctacctatagatttatttgttgctgctcccatcatcagatcagaccaccagctgtatgagtatatacacagtttgtatgctaaattctttctaaataaacatccttatgct

SEQ ID NO: 254 - protein, 199 aa, Oryza sativa
MASLTIVVATIFLLSLTSASVAVHGRSSRRRFVRSYDEPCMEMRLYLHDILYDYSNSTSNSTAAAATKPTALANAVPSTGGTFFGEVVVFNDPVTEGRALPPSLEETAVRAQGLYLYNSKEAFNAWLAFSIVFNSTGRRGTLNLMGADIIAEKTRDISVVGGTGDFFMSRGVATLRTDAFEGFTYFRLQMDIKLYECYV

SEQ ID NO: 255 - DNA, 1413 bp, Oryza sativa
actagctcatgcgcatttcggctctcgccttcttcgccttcttctcctcctcctcctgttcttgattttcagtatattcaattcatggattcgtggattgagcagacttccctgagcttggacctcaacgtcggcctgccgtcgacggcgaggagatcatcggctccggcggcgccgattaaggttctcgtggaggagaacttcttgtccttcaagaaggatcacgaggttgaggcgctggaggcggagctccggcgagcgagcgaggagaacaagaagctgaccgagatgcttcgggcggtggtggccaagtacaccgagctgcagggacaggtcaacgacatgatgtcggcggcggcggcggcggcggtcaacgccgggaaccaccagtcgtcgacgtcggagggcggctcggtgtcgccatcgaggaagcggatccgtagcgtcgacagcctcgacgacgccgcccaccaccgcaagccatcccctccgttcgtcgccgccgccgcagccgcggcctacgcctcccccgaccagatggagtgcacgtcggcggccgccgccgccgccgcgaagcgcgtcgtccgcgaggactgcaagcccaaggtctccaagcgcttcgtccacgccgacccctccgacctcagcctcgtggtgaaggatgggtatcaatggcggaagtacgggcagaaggtgacgaaggacaacccgtgcccgcgagcctacttcaggtgctcgttcgcgccggcgtgcccggtgaagaagaaggtgcagcgcagcgccgacgacaacaccgtcctcgtcgccacgtacgagggcgagcacaaccacgcccagccgccgcaccacgacgccggcagcaagaccgccgccgccgccaagcactcacagcaccagccgccaccgagcgccgccgccgccgtcgaccggcagcagcaagagcaggcggcggcggccgggccgtcgacggaggtggcggcgaggaagaacctggccgagcagatggcggcgacgctgacgagggaccccgggttcaaggcggcgctcgtcacggcgctctccggccggatcctcgagctctcgccgaccaagaactgatccatcgttagaacgccgatgaactttgctcgatttagctgagatcgatcgatcaatttacacggtaaaattttagagttgatcgatttgcatggctttgatcggagttaggctagagagagagaggattaactgtgtatatttagtgattgattttaattagctcgctctacacgtgccaaggtggcagtttaagcaaaacgtacgataattcgttgcaatttgtaattcagctagaagattagtgtattcatggagatctattcagagtctcccagatatatatatagagagagagatagtagcattgatgtt

SEQ ID NO: 256 - protein, 337 aa, Oryza sativa
MDSWIEQTSLSLDLNVGLPSTARRSSAPAAPIKVLVEENFLSFKKDHEVEALEAELRRASEENKKLTEMLRAVVAKYTELQGQVNDMMSAAAAAAVNAGNHQSSTSEGGSVSPSRKRIRSVDSLDDAAHHRKPSPPFVAAAAAAAYASPDQMECTSAAAAAAAKRVVREDCKPKVSKRFVHADPSDLSLVVKDGYQWRKYGQKVTKDNPCPRAYFRCSFAPACPVKKKVQRSADDNTVLVATYEGEHNHAQPPHHDAGSKTAAAAKHSQHQPPPSAAAAVDRQQQEQAAAAGPSTEVAARKNLAEQMAATLTRDPGFKAALVTALSGRILELSPTKN

SEQ ID NO: 257 - DNA, 2098 bp, Oryza sativa
acgcgtcccgctctagtgctttagccttttccattcacgccaaaggcaacctcgagttcagctcggtacgtgtcggggagagtcaagagaaagagaaagagagggctagcttagctgtgagctccatggaggcggctgtcatggagcgggagcggctcacggcggagatggcgttccgcgacgacgcgcgggcggccgggggggagtgggcgccgagcatcgtgatcaagatccggcgccgcctcccggacttcgcgcggtccgtgaacctcaagtacgtcaagctcgggatccggcacggcggcagcgtcacgtcgtacctgcccatgctgtgcgtgccgctgctcgcctccgccgcctactccttcgtccgcctcgacgtcatctaccgctccatcgacccgctcacctgcgtcgcctggctcgggaccgccgtgctgctgctcaccgtctactacttcaagcgcccgcgcccggtgtacctcgtcgagttcgcctgctacaagccggacgaccagcacaagatctccaaggaaggcttcctcgagatgaccgagagcaccggctgcttcaatgacgccgcgctcgacttccagaccaagatcaccaatcgctccgcgctcggcgacgagacgtacctccctcccggcgtccaggcgcggccgccgaggctcaacatggccgaggcgaggatggaggccgaggccgtcatgttcgggtgcctcgacgcgctcttcgagtccaccgggatcaacccgaaacgcgacgtgggcatcctcatcgtcaactgcagcctcttcaacccgacgccgtcgctgtcgtcgatgatcatcaaccactacgagatgcgggcggacgtcaagtcgttcaacctcggcggcatggggtgcagcgccggcctcatcgccatcgacctcgccaaggacatgctccaggcgaaccccaactcgtacgcggtcgtcctcagcacggagaacatcaccctcaactggtacttcggtaacgaccgctcgatgctcctttcgaattgcatcttccgtatgggcggcgcggcggcgctgctctcgaaccgccgcgccgacgccggccgcgccaagtaccggttgctgcacaccgtgcggacgcacaagggcgccaccgacgagtgcttcaactgcgtgtaccagcgcgaggacgaggacgggaaggtcggggtgtcgctggcgcgggagctcatggcggtggccggcgacgcgctcaagaccaacatcaccacgctggggcccctcgtcctcccgctcaccgagcagctcaagttcctcaagtccctgatgatgcgccgcgtgttccgcgtcaagggcgtgcgcccctacatcccggacttccgccgcgcgttcgagcacttctgcgtgcacgccggcggccgcgccgtgctggaggaggtgcagcgcagcctcagcctggaggacagggacatggagccgagcaagtgctcgctgcaccggttcggcaacaccagcagcagctcgctgtggtacgagctggcgtacgccgaggccaagggccgcgtccagcgcggcaaccgcgtgtggcagatcggcttcggctcggggttcaagtgcaacagcgcggtctggcgcgcgctccgcgacgtgccggccgtgtcgccgccgccgaaggggaagaagagctgcaacccctgggtggactgcgtcgccaagtacccgcccaaggcgtacgtttgacggttacgttttcgtgacctcgcacaaattgtatgattcatttctcctcaccaaaacacacaaaaaaaagagggcatatgctggggaagacttttttttttttgtcgttttttcttcttcgcataggtttgctgtagacattgccggttattggaattcagggatttatacggcgaattgaattccaaaagctagcagtgccattcttttcagtttttgtactagcagcatttgttttacacatcctggccttctagaagttggggggaaacagaatggaggacatcacaacatgccatactacatatgactagagaacaatattgccaagtgtaaattataaacgagaaatcaatgttacacgttgtttgtgt

SEQ ID NO: 258 - protein, 532 aa, Oryza sativa
MEAAVMERERLTAEMAFRDDARAAGGEWAPSIVIKIRRRLPDFARSVNLKYVKLGIRHGGSVTSYLPMLCVPLLASAAYSFVRLDVIYRSIDPLTCVAWLGTAVLLLTVYYFKRPRPVYLVEFACYKPDDQHKISKEGFLEMTESTGCFNDAALDFQTKITNRSALGDETYLPPGVQARPPRLNMAEARMEAEAVMFGCLDALFESTGINPKRDVGILIVNCSLFNPTPSLSSMIINHYEMRADVKSFNLGGMGCSAGLIAIDLAKDMLQANPNSYAVVLSTENITLNWYFGNDRSMLLSNCIFRMGGAAALLSNRRADAGRAKYRLLHTVRTHKGATDECFNCVYQREDEDGKVGVSLARELMAVAGDALKTNITTLGPLVLPLTEQLKFLKSLMMRRVFRVKGVRPYIPDFRRAFEHFCVHAGGRAVLEEVQRSLSLEDRDMEPSKCSLHRFGNTSSSSLWYELAYAEAKGRVQRGNRVWQIGFGSGFKCNSAVWRALRDVPAVSPPPKGKKSCNPWVDCVAKYPPKAYV

SEQ ID NO: 259 - DNA, 1108 bp, Oryza sativa; identical to SEQ ID NO: 86

SEQ ID NO: 260 - protein, 255 aa, Oryza sativa; identical to SEQ ID NO: 87

SEQ ID NO: 261 - DNA, 828 bp, Oryza sativa
gattcccaccacaagctaattaaggtaccagcaactccatcacatccttaatttgcagcagcaggtaattgtacaccggcgaaggaaattaaaggaaagtaggagatcgatggccaagccaagcgccgccgcctggtccaccggcctcttggactgcttcgacgactgcggcctatgctgcatgacgtgctggtgcccgtgcatcacgttcgggcgggtggcggagatggtggacagggggtcgacgtcgtgcggcaccagcggcgcgctgtacgcgctgctggcgacggtcaccggctgccagttcgtctactcctgcgtctaccggggcaagatgcgcgcccagtacggcctcggcgacgacgccgcctgcgccgactgctgcgtccacttctggtgcaacaagtgcgcgctgtgccaggagtaccgcgagctcgtcgcccgcggctacgaccccaagctcggatgggacctcaacgtccagcgcggcgccgccgccgccgcagcgcccgccgtgcagcacatgggccgttaaatggattagctagctatagcgtcacctcgtatctatcatatcatcgatcgatcgtactttgggcgtgtgaagtggtgtccagttaaaaaaaagttttttttttgggagctagttatagtatccagttttttaaaagaaatttataagtggtatattaattatatgcgtttttttacttgatactatctactatgcctctatatactcctgtaattaagtttgtgtaagtatggtgacgcatggtcaggttttgtttgtaattctctgcacttaatcaattgtttgttgtatct

SEQ ID NO: 262 - protein, 148 aa, Oryza sativa
MLHDVLVPVHHVRAGGGDGGQGVDVVRHQRRAVRAAGDGHRLPVRLLLRLPGQDARPVRPRRRRRLRRLLRPLLVQQVRAVPGVPRARRPRLRPQARMGPQRPARRRRRRSARRAAHGPLNGLASYSVTSYLSYHRSIVLWACEVVSS

SEQ ID NO: 263 - DNA, 1028 bp, Oryza sativa
atcctcaccaagcaaagtatagcagcaaacaaagccagcttgtcactgcgcttctttcctagtttccttctcaattctcattctcaaaagagaatatattgagctgatcgagctagatatatagaagcactagctagttgatcaacaatggagcacagcttcaaaaccatagcagctggagtggtgatcgtcgtgctgctcctgcagcaggcgcccgtgctgattcgggccaccgacgcggaccctctccaggacttctgcgtcgccgacctcgacagcaaggtcacggtgaacgggcacgcgtgcaagccggcgtcggccgccggcgacgagttcctcttctcctccaagattgccacgggcggcgacgtgaacgccaacccgaacggctccaacgtcacggagctcgacgtcgccgagtggcccggcgtcaacacgctcggcgtgtccatgaaccgcgtcgacttcgcgcccggtggcaccaacccgccgcacgtccacccgcgcgccaccgaggtcggcatcgtgctccgcggcgagctcctcgtcggcatcatcggcaccctcgacaccgggaacaggtactactccaaggtggtccgtgccggcgagacgttcgtcatcccgagggggctcatgcacttccagttcaacgttggcaagacggaggccaccatggtggtgtccttcaacagccagaaccccggcatcgtcttcgtcccgctcacattgttcggctccaacccgcccatcccgacgccggtgcttgtcaaggcactccgcgtggatgctggtgtagttgagctgctcaagtccaaattcaccggcgggtactaattaatccgagagcattttcatggtgttctctgctaccagcagcatactttaagctcccgttgtgtggttgcatgttattggattgaataaactttctcccatgttatgggaatggaaataaaatgtaatacttctttgtgatgttttttttctccttataatgaattaagaatcgtgtatcttttctgtgt

SEQ ID NO: 264 - protein, 229 aa, Oryza sativa
MEHSFKTIAAGVVIVVLLLQQAPVLIRATDADPLQDFCVADLDSKVTVNGHACKPASAAGDEFLFSSKIATGGDVNANPNGSNVTELDVAEWPGVNTLGVSMNRVDFAPGGTNPPHVHPRATEVGIVLRGELLVGIIGTLDTGNRYYSKVVRAGETFVIPRGLMHFQFNVGKTEATMVVSFNSQNPGIVFVPLTLFGSNPPIPTPVLVKALRVDAGVVELLKSKFTGGY

SEQ ID NO: 265 - DNA, 2089 bp, Oryza sativa
atgctgatacaaaatttaaaagaaaaaataaactagaagtgagataagcgggctaaaataacccgcttgccaccgatcggagcttatattggcctctaccatcttagttcttgggagctcacgtacgtagtatcaactatcaagcggcaggatggcagccaagccgtcctcgtcgtcgtcgtcgacgggcggccaccacacggtggacatccgcgcggcgcaggcgcagcccgaggacgcgaggcagtcggcgatgagcgggccgatcaacatccgcggcgagcggaggccgccgccgatgtagcgggcgttcagccggcaggtctccctcggcagcggcgtgacggtgctgggcatggacaaggtgggcaagaacggcggccgggggcagcagcgtgcgctcccgcgcagcggcaagagcctcggggtgctcaaccacaccggcgccctcggccaggccgccgccggcgacggcgcggcacgcaggggagacttcagcatgttccggacgaagtcgacgctgagcaagcagaactcgctgctgccgtcgaggatcagggagcccgacctcgagctgccgccgcacgtcgagggcccctccgtcggcaggcagggcggcgaggaccctctcaacaagagcgtccccgccggccggtacttcgccgcgctccgcggcccagagctcgacgaagtccgcgactacgaggacatcctgctgccgaaggacgaggtgtggccgttcttgctgcggtttccggtcggctgcttcggtgtctgcttggggctcggcagccaggccatcctgtggggcgcgctggcggcgagcccggcgatgaggttcctgcacgtcacgccgatgatcaacgtcgcgctgtggctgctcgcgctcgccgtgctcgtcgccgtgtccgtcacctacgcgctcaagtgcgtcttctacttcgaggccatccgccgcgagtacttccacccggtgcgcgtcaacttcttcttcgcgccgtcgatcgccgccatgttcctcaccatcggcctgccgcgcgccgtggcgccggagaggttgcacccggccgtctggtgcgcgttcgtcgcgccgctgttcgggctcgagctcaagatctacgggcagtggctctccggcggcaagcggaggctgtgcaaggtggccaacccgtcgtcccacctctcggtggtgggcaacttcgtcggggccatcctggcggcgagggtcggttgggcggaggccggcaagttcctctgggccatcggcgtcgcgcactacatcgtggtgttcgtcacgctgtaccagcggctgccgaccaacgaggcgctgcccaaggagctccacccggtgtactccatgttcatcgccacgccgtcggcggcgagcctcgcgtgggcggcgatctacggcagcttcgacgccgtggcgcgcaccttcttcttcatggcgctcttcctgtacatgtccctcgtcgttcgcatcaacttcttccgcggcttccggttctcgatcgcgtggtggtcgtacacgttcccgatgacgacggcgtcgctggccaccgtcaagtacgcggaggcggagccgtgcttcaccagcagggcgctcgcgctgagcctctccctcatgtcgacgacgatggtgtcgctgctgctcgtgtcgacgctcctgcacgcgttcgtctggaggtcgctgttccccaacgacctggccatcgccatcaccaaggacaggcagaacggcgcgttcaaaccgcacggcaaagggaggaaggccggcaagagggtgtacgacatcaagcgatgggcgaagcaggcgccgctctcgctcgtgtcgtccatcaccaagagcaactcggcggacaaggaagaagaggagaaaacagaatgaagcgcaactcagaaatcagaaccaggaattgatgatgcatgtataaatggtcaggatatagccacagggaataacattcacgaacaaggaagatgatgtacacgacatataagttagatcgattaccatcacatataaaaccaatcacgcatcatgtaatgaaatgtctaaaagccatacggcagattatcataccgcgac

SEQ ID NO: 266 - protein, 510 aa, Oryza sativa
MDKVGKNGGRGQQRALPRSGKSLGVLNHTGALGQAAAGDGAARRGDFSMFRTKSTLSKQNSLLPSRIREPDLELPPHVEGPSVGRQGGEDPLNKSVPAGRYFAALRGPELDEVRDYEDILLPKDEVWPFLLRFPVGCFGVCLGLGSQAILWGALAASPAMRFLHVTPMINVALWLLALAVLVAVSVTYALKCVFYFEAIRREYFHPVRVNFFFAPSIAAMFLTIGLPRAVAPERLHPAVWCAFVAPLFGLELKIYGQWLSGGKRRLCKVANPSSHLSVVGNFVGAILAARVGWAEAGKFLWAIGVAHYIVVFVTLYQRLPTNEALPKELHPVYSMFIATPSAASLAWAAIYGSFDAVARTFFFMALFLYMSLVVRINFFRGFRFSIAWWSYTFPMTTASLATVKYAEAEPCFTSRALALSLSLMSTTMVSLLLVSTLLHAFVWRSLFPNDLAIAITKDRQNGAFKPHGKGRKAGKRVYDIKRWAKQAPLSLVSSITKSNSADKEEEEKTE

SEQ ID NO: 267 - DNA, 1483 bp, Oryza sativa; identical to SEQ ID NO: 152

SEQ ID NO: 268 - protein, 366 aa, Oryza sativa; identical to SEQ ID NO: 153

SEQ ID NO: 269 - DNA, 1405 bp, Oryza sativa
atcccattcccgccatctctgcatcttcttcttcttcctcttccttctgatcacctctcctccaagaagctttcgtttctctcatctgtcaatcatgtcggcctactgcggcaagtacaaggatgagttgatcaggaacgcggcgtacattgggacgccggggaagggcatcctcgccgccgacgagtcgacgggcacgatcgggaagcggctggcgagcatcggcgtggagaatgtcgaggagaaccgccgcgcgctccgggagctcctgttcacggcgcccggcgcgctggactgcctcagcggcgtcatcctgttcgaggagacgctctaccagagcacccgcgacgggacgccgttcgtcgacgtgctcgccgccgccggcgttctggccgggatcaaggtcgacaagggcaccgtcgagctcgccggcaccgaccgcgagacgacgacacaggggcacgacggcctcggcgagcgctgcaggcggtactacgccgccggcgcgcggttcgccaagtggcgcgccgtgctcagcatcggcagggcgtcgtccaggccgtcgcagctcgccgtcgacgccaacgcgcagggcctcgcgcggtacgccatcatctgccaggagaacgggctggtccccatcgtcgagccggagatcctcgtcgacggcgagcacggcatcgaggcttgcgccgaggtgacggagcgcgtcctcgccgcgtgctacaaggcgctgagcgaccaccacgtcctcctcgagggcaccctcctcaagcccaacatggtgacgccgggctccgacgccgccagggcgccgccggaggtggtcgccgagcacaccgtccgcgcgctcctccgcaccgtgccgccggcggtgccggccatcgtgttcctgtccggcgggcagagcgaggaggaggcgacgaggaacctgaacgccatgaaccaggtggcgagcaggggcaagaagccatggtcgctgaccttctccttcggccgcgcgctgcagcagagcacgctcaaggcgtgggccggcaaggcggagaacgtcggcaaggcgcaggcggcgctgctcgccgctgcagggccaactcccaggcgacgctcggcgcgtacgccggcgacgccgccgccggcgagggcgtctccgagaacctccacgtcaaggactacaagtactgaggctttatgacgaattgatatttttgttttataatgtagtgtaacaataagctgcgattgcttctatgctctcgcaatgtcgcgtatttgattttgatttttgcttggtcttgtttagcgagtgttttgttttggttctgaattttgaaatgaattcaaagtgattttgtctgctgtttaacagtgaattaaaaagtggagtactacctgatgattccaggac

SEQ ID NO: 270 - protein, 365 aa, Oryza sativa
MSAYCGKYKDELIRNAAYIGTPGKGILAADESTGTIGKRLASIGVENVEENRRALRELLFTAPGALDCLSGVILFEETLYQSTRDGTPFVDVLAAAGVLAGIKVDKGTVELAGTDRETTTQGHDGLGERCRRYYAAGARFAKWRAVLSIGRASSRPSQLAVDANAQGLARYAIICQENGLVPIVEPEILVDGEHGIEACAEVTERVLAACYKALSDHHVLLEGTLLKPNMVTPGSDAARAPPEVVAEHTVRALLRTVPPAVPAIVFLSGGQSEEEATRNLNAMNQVASRGKKPWSLTFSFGRALQQSTLKAWAGKAENVGKAQAALLAAAGPTPRRRSARTPATPPPARASPRTSTSRTTSTEAL

SEQ ID NO: 271 - DNA, 1466 bp, Oryza sativa; identical to SEQ ID NO: 146

SEQ ID NO: 272 - protein, 364 aa, Oryza sativa; identical to SEQ ID NO: 147

SEQ ID NO: 273 - DNA, 1211 bp, Oryza sativa; identical to SEQ ID NO: 142

SEQ ID NO: 274 - protein, 261 aa, Oryza sativa; identical to SEQ ID NO: 143

SEQ ID NO: 275 - DNA, 1269 bp, Oryza sativa; identical to SEQ ID NO: 150

SEQ ID NO: 276 - protein, 216 aa, Oryza sativa; identical to SEQ ID NO: 151

SEQ ID NO: 277 - DNA, 2088 bp, Oryza sativa
ggtagtgcaattcacttatacacggagtttaattagtttattgccttctacaatggataggatcttcgcccgtttcttttgcttcctactgattgcggcagtaagccatgcagctgatctgtcccccgagcaatactggcgatccatcctccctaacaccccaatgccaagctccatctcccaacttcttaactacccttacttgcctgctgttagattacctcgccgtacggatgctggtcagcgcaactacaaatcatcagtttcacatgtggctgaacgatctcaccgtgtagatgatggccaacgcaactacaagttatcagctttacctgccactaatgaactacctcaccgtacggatgctggtcaacgcaactacaagtcatcagtttcacctgtggctgaactacctcaccgtgtagatgatggccaacgcaactacaagttatcagctttacctgccactaatgaactacctcaccgtacggatgctggtcaacgcaactacaagtcatcagtttcacctatggctgaactatctcaccgtgtagatgatggtcaacgcaactacaagttatcagctttacctgccactaatgaactacctcaccatacggatgctggtcaacgcaactacaagtcatcagtttcacctgtggctgaactacctcaccgtgtagatgatggtcaacgcaactacaagttatcagctttacctgccactaatgaactacctcaccgtacggatgctggtcaacgcaactacaagtcatcagtttcacctgtggctgaactacctcaccgtgtagatgatggccaacgcaactacaagttatcagctttacctgccactaatgaactacctcaccgtatagatgctggtcaacgcaactacaagtcatcagtttcacctatggctgaactacctcaccgtgcagatgatggtcaacgcaactacaagttatcagtttcacctgctgctgaactacctcaccgtgtagatgatggtcaacgcaattacaagttatcagttttacctgccactgaactagttcactatacagatggtcaacgcaattacaagtcatcagttttggagacgccagaacttctcaaagaccccgacatggcgctcttcttccttgagaagaatcttcaacaaggtaaaaaaattaataacgccctccacttcgccaacttgttggccactacgaactccaagttcctgccacgaggcaaggcggactccatcccgttctcctctaaagaactacccgagatcctggaccggttcggggtgcggccgggctccgacgacgcggctgagatgagtgctacgctgcaggactgcgagctgccggcgaataagggagagaagaaggcctgcgccacgtcgctggagtctatagtcgacttcgtcacatccagctttggggccagtgacgtcgacgccgcctccaccgttgtgctcagtaaggcggtggagtcttcttcgctggcgcaggactacacggtgagcggcgtgaggcgaatggccggaaccggccagctcatcgcttgccatccggagtcgtacccgtacgctgtgttcatgtgccacctcacagaggcgacgacgagggcgtacaaggcctcattggtcggcaaagatggtactgcggtggaggcggtcgccgtgtgccacaccgacacgtcggactggaacccagagcacgctgccttccatgtgctcggcgtcaagcctgggactgtgcctgtctgccacttcatgcagcctgacactgtcgtctggacccgcaggggctgatgtatgtatgtatgccatatagtacctacttcatcgtactgtactgcgtacgcatgctgccagctgctttgcataccttgctgctggagatatataattaatatccagcacttatatactcgtcacttctatcgtgtgtcgaaggttatatacttgtagcatttggggatgcagtacgtacgtgtgtctgtaataagtttcgtgatatgttgcttcatccatatggaccatatgtaccaccaatcccagtgatatataataatataatatcgttgtct

SEQ ID NO: 278 - protein, 585 aa, Oryza sativa
MDRIFARFFCFLLIAAVSHAADLSPEQYWRSILPNTPMPSSISQLLNYPYLPAVRLPRRTDAGQRNYKSSVSHVAERSHRVDDGQRNYKLSALPATNELPHRTDAGQRNYKSSVSPVAELPHRVDDGQRNYKLSALPATNELPHRTDAGQRNYKSSVSPMAELSHRVDDGQRNYKLSALPATNELPHHTDAGQRNYKSSVSPVAELPHRVDDGQRNYKLSALPATNELPHRTDAGQRNYKSSVSPVAELPHRVDDGQRNYKLSALPATNELPHRIDAGQRNYKSSVSPMAELPHRADDGQRNYKLSVSPAAELPHRVDDGQRNYKLSVLPATELVHYTDGQRNYKSSVLETPELLKDPDMALFFLEKNLQQGKKINNALHFANLLATTNSKFLPRGKADSIPFSSKELPEILDRFGVRPGSDDAAEMSATLQDCELPANKGEKKACATSLESIVDFVTSSFGASDVDAASTVVLSKAVESSSLAQDYTVSGVRRMAGTGQLIACHPESYPYAVFMCHLTEATTRAYKASLVGKDGTAVEAVAVCHTDTSDWNPEHAAFHVLGVKPGTVPVCHFMQPDTVVWTRRG

SEQ ID NO: 279 - DNA, 816 bp, Oryza sativa
gacacgtttcagctgtctttcagtgttcacgtaggttgtagagagcacaacaacgtacgtacacagcagcaaagactgagactagctagcttagctgacatggctccaaggtgcgcgacgctggcggtggtggtggtgctggtggcggccgtggtggcgccgccgacggcggtgcgcgcggctatctcgtgctcggcggtgtacaacacgctgatgccgtgcctgccgtacgtgcaggcggggggcacggtgcccagggcgtgctgcggcggcattcagagcctgctcgccgccgccaacaacacccccgatcgccgcaccatctgcggctgcctcaagaacgtcgccaacggcgcctccgggggcccctacatcacccgcgccgccgcgctcccctccaagtgcaacgtctccctcccttacaagatcagcaccagcgtcaactgcaacgcgataaactagggcggccggcctgatgcgtacgtgtgtgcccgcgcctcccgtacgagaggagaataaaatgtcattagtaccatcaaattaagctagctagttaagctttacgaaaatcgatccctttcttcctctgtggtgtttagcagtttagggatcgtatgtctccacagttcctactatagtgtcgcttgggcgatggtggagctatattgtgcactttataaggtggtgttattatgtaacgcctgtgctagctttggtcctgatgttctccatgtgaactgtgtcaaccgtccattgttctgcaaatctgcagtatgtactgtgtgtgatagtatcaagctgaacttctgaacatgc

SEQ ID NO: 280 - protein, 120 aa, Oryza sativa
MAPRCATLAVVVVLVAAVVAPPTAVRAAISCSAVYNTLMPCLPYVQAGGTVPRACCGGIQSLLAAANNTPDRRTICGCLKNVANGASGGPYITRAAALPSKCNVSLPYKISTSVNCNAIN

SEQ ID NO: 281 - DNA, 684 bp, Oryza sativa
atggagtacggcttcaaagcagctgggttggtgttcgtcgtgctgctcctgcagcaggcgcccgtgttaatccgagccaccgacgcggaccctctgcaggatttctgcgtcgctgacctcaacagcgaggtgacggtgaacgggcacgcgtgcaagccggcgtcggccgccggcgacgagttcctcttctcctccaagattgccacgggcggcgacgtgaacgccaacccgaacggctccaacgtcacggagctcgacgtcgccgagtggcccggcgtcaacacgctcggcgtgtccatgaaccgcgtcgacttcgcgcccggtggcaccaacccgccgcacgtccacccgcgcgccaccgaggtcggcatcgtgctccgcggcgagctcctcgtcggcatcatcggcaccctcgacaccgggaacaggtactactccaaggtggtccgtgccggcgagacgttcgtcatcccgagggggctcatgcacttccagttcaacgttggcaagacggaggccaccatggtggtgtccttcaacagccagaaccccggcatcgtcttcgtcccgctcacattgttcggctccaacccgcccatcccgacgccggtgcttgtcaaggcactccgcgtggatgctggtgtagttgagctgctcaagtccaaattcaccggcgggtactaa

SEQ ID NO: 282 - protein, 227 aa, Oryza sativa
MEYGFKAAGLVFVVLLLQQAPVLIRATDADPLQDFCVADLNSEVTVNGHACKPASAAGDEFLFSSKIATGGDVNANPNGSNVTELDVAEWPGVNTLGVSMNRVDFAPGGTNPPHVHPRATEVGIVLRGELLVGIIGTLDTGNRYYSKVVRAGETFVIPRGLMHFQFNVGKTEATMVVSFNSQNPGIVFVPLTLFGSNPPIPTPVLVKALRVDAGVVELLKSKFTGGY

SEQ ID NO: 283 - DNA, 1494 bp, Oryza sativa
aattgatagcctgtgcgtctccaagaagaggcttgccgctgccgccattggagccctctcgtttctgctcgagctctgcatttcttcagtaggaggaggaggaggaagagttggagtcgccatgtcgtcgtccctgctcactgacctcgttaacctcgacctgtcggagagcacggacaaggtcatcgccgagtacatatgggttggtggtactgggatggatgtgaggagcaaagccagaacgttgtctggacctgttgatgacccaagcaagcttccaaagtggaactttgatggctccagcaccggtcaggctaccggtgacgacagtgaagtcatcctccaccctcaagccatcttcagagacccattcaggaaggggaagaacatcctggtcatgtgtgactgttatgcgccgaatggcgagccgattccgacgaacaaccggtacaatgcagcaaggatcttcagtcatcctgatgtcaaggctgaagagccatggtatgggattgagcaggagtacacccttcttcagaagcacatcaactggcctcttggctggccactaggtggctatccaggccctcagggtccgtactactgtgcggcgggagccgataaatcgtacgggcgcgacatcgttgatgcccactacaaggcctgcctgtttgccggcatcaacatcagcgggatcaacgcagaagtcatgccggggcagtgggagttccagattggccctgtcgttggcgtctccgcaggggatcatgtctgggtggcacgctacattcttgagaggatcactgagattgctggcgtcgtcgtgtccttcgaccccaagcccattccgggagactggaatggcgccggtgctcacaccaactacagcaccaagtcgatgaggagcaatggcggctacgaggtgatcaagaaagcgatcaagaagcttggcatgcgccaccgtgagcacatcgccgcctacggcgacggcaacgagcgccgcctcaccggccgccacgagaccgccgacatcaacaacttcgtctggggcgtagcgaaccgcggcgcgtcggtgcgtgtcggccgggacaccgagaaggacggcaaaggttacttcgaggacaggaggccggcgtccaacatggacccgtacctggtgaccgccatgatcgccgagaccaccatcctctgggagcccagccacggccacggccacggccaatccaacggcaagtgaggaggagtcgcctcgcccgggttgatgaactgctttctcgcgttctgggtttcatggaaatctgtgtgtgtgttctctgacgctggtgctgttagaaacttccaataattcagaaataactgcgatgtgctctcaaatttctcatgaggccatcacctgcagcatctcatgaaatagatctattgcaatgacaataccaatggcaacgcaaaattttatggtacctccagataccatctactctcctcaataatgacaat

SEQ ID NO: 284 - protein, 370 aa, Oryza sativa
MSSSLLTDLVNLDLSESTDKVIAEYIWVGGTGMDVRSKARTLSGPVDDPSKLPKWNFDGSSTGQATGDDSEVILHPQAIFRDPFRKGKNILVMCDCYAPNGEPIPTNNRYNAARIFSHPDVKAEEPWYGIEQEYTLLQKHINWPLGWPLGGYPGPQGPYYCAAGADKSYGRDIVDAHYKACLFAGINISGINAEVMPGQWEFQIGPVVGVSAGDHVWVARYILERITEIAGVVVSFDPKPIPGDWNGAGAHTNYSTKSMRSNGGYEVIKKAIKKLGMRHREHIAAYGDGNERRLTGRHETADINNFVWGVANRGASVRVGRDTEKDGKGYFEDRRPASNMDPYLVTAMIAETTILWEPSHGHGHGQSNGK

SEQ ID NO: 285 - DNA, 2882 bp, Oryza sativa
gtcatttcatcgaacaccttgcaatcaccctctcaccaccgctagagatcaccattgtgaggctccccggccggagctggaggttggagggagtggaggaagagccgtgctgccgccgtcgccatgggggaagccaggtagccgctggacatcaagaaacgccgtcgagcaccttacatcgccgctgtctgcccctgtcctgcaccgcgtcgagctccacttcgccgcgtttcgccatctcgccgtctcgcgaaattgtatatcggttagtcgtgaggcaacgtatgcagcttccaggaggtgaaggttgatcaagatcatatcaagaataagaactatcctgagcagagtattgaagagaagcccttgttagtacgcttgcgtacctaacaagatgatcggagtgcggttctgttctaggtctcgttccccagtcgactgcttgtggcatgtcaactgagcccttgtattattttgtcttccactgttgtttctctgatagttgttggcctgcctggccctaatgtaagtatttaactctcttagcctgaattcattcgtgatatgttgtgattcggctatgtatgtgtgtaccaactactgatccagggattggtactgataaacacagaagatttccgatttacaaaatcgggggtcgacatgccagatctggcggaggggagggccccgccatgttgccgcctcccttcccgctggatctggcggagaggagggtgccgccgcttccgggccgcttcctcccctcccgtcggctctggcataggggagcacgccgccgtgctgccgctggaccaccgcctcccctcccatcggatctggcagaggggagggccccgccatggtggatggaggaggaggagaggagtgctgccactgttgtggatggaagaggaggagagaggagaaggaagaaatggagagaaagaaggaagaagaagagaggaggaagtggattgcgggtgcgggagatagagttcgagagagagggaggggaggaagagataaggatgggagtagatagggtggctcagctcggctcggttagttcggcagataggtgtcggttttaaaaaaaccggcacttataatatattataggtctcggtttttaattaaccgacacctataatatattacagatgccggtttttttcttaaaaaccgacacccatagtataagtgtcgatttttctttagaaccaacacctatagttgtttaaaggtgtcggtttttttatgttttcatcccgttgaggtttgaaaaacattatatataggtgccagttttagcacgtccggtacctatagtgccgatatatatgtccctttttgtagtagtgatccctcggaataatagtaaccaaacaatattcttattctgcaggtgtgaacaaattaaacttagttttgtcttgatcatctgccaactattctttttaaggttaactgtcgactactcgcatttctcatatacccatcctcctcgtggaaaacagttctcctcctagactatgtttagttcctaaaaaaagttgaaagtttagggaaagttagtagtttggaaaaaaaattgaaagttcatgtgtgtaggagagatttggatgtgatgtgatggaaagctggaagttgggggtgaactaaacacggccctagtgttctctcgttccccaaaattaatataaatatatttactctttctacacatttacatcaacacaattcgcaatatgcgaagatcgtttcatattgccttccacgtgtaccgtaaaaggggagcaaatacagtcgacagtggatggaggggaatagctctggttttcccaacagccaaccaccagctgctaagctagctcccaatcgtattgaatgaacgtatggacacatgcaccgtttaaacaccacaaacccatccttgctttgttaattgctcgatctcttgcagctgcgtgcaccgcatctgtgcatgcatccacactagcaactctacctatttaagcccctgcattcccgcgtattctcctcatccatctcatcagcaacgaaccaattcacaccgatcgatcgagcaacagtagtaggaaccatggcccgtgcacagttggtgttggtcgccgttgtggcagctctgctcctcgccgccccgcacgccgccgtggccatcacctgcggccaggtcaactccgccgttgggccctgcctcacctacgcccgcggcggcgccggcccgtcggcggcctgctgcagcggcgtgaggagcctcaaggccgcagccagcagcaccgctgacaggcgcaccgcgtgcaactgcctcaagaacgcggcccgcggcatcaaggggctcaacgccggcaacgccgccagcatcccctctaagtgcggcgtcagcgtcccctacaccatcagcgcttccatcgactgctccagggtgagctgagctatcgatcggatggatcatttatatgcatacagaagcgcgacggtgggtcgatgtgtggagccgatcgaattctgtatccaatattagtagtatctgtacgtattctggaataaaaagatgagctagctaaggtcgatcaatcaccatgcatgcatgtgtgtgcatccatggttgatcggcccggccggtcaggctagctagctttcttcttcttgtgtgttcatctcgtacgttttgctccttctcgaggtgtacgtgtaccagagagagctagctagagattctacatgcatgtactgcaactccttgtactacgtgcttgttttggaatattacacatacatatagctctttttggtacatatatagctctttgtagagctccacactagtatagatactctcatctgtgacgtcctct

SEQ ID NO: 286 - protein, 169 aa, Oryza sativa
MCVPTTDPGIGTDKHRRFPIYKIGGRHARSGGGEGPAMLPPPFPLDLAERRVPPLPGRFLPSRRLWHRGARRRAAAGPPPPLPSDLAEGRAPPWWMEEEERSAATVVDGRGGERRRKKWRERRKKKRGGSGLRVREIEFEREGGEEEIRMGVDRVAQLGSVSSADRCRF

SEQ ID NO: 287 - DNA, 1337 bp, Oryza sativa
gaccacacccctaccgcccactcccccggccgccgccgcatctgcgctcttagggcctctccttccccatccccaaatttcccctccggccatggccaccgacggcacaggcgtcgtcaccgtctacggctccggcaccaacggtgccgccttgctcgagccctccaaccacaagtccgccaccttctccgtcaaggtgggcctcgcccagatgctgcgcggcggcgtcatcatggacgtcgtcacccccgaacaggcgcgcatcgccgaggaggccggtgcctgcgccgtcatggccctcgagcgcgtccccgccgacatccgcgcccagggcggcgtcgcccgcatgtccgaccctggcctcatccgcgacatcaagcgcgccgtcaccatccccgtcatggccaaggcccgcatcggccacttcgtcgaggcccagatcctcgaggccatcggcgtcgactacgtcgacgagagcgaggtcctcaccctcgccgacgacgcccaccacatcaacaagcacaacttccgcgtccccttcgtctgcggctgccgcgacctcggcgaggccctccgccgcatccgcgagggcgccgccatgatccgcaccaagggcgaggccggcaccggcaacgtcgtcgaggccgtccgccacgtccgctccgtcatgggcgacatccgcgcgctccgcaacatggacgacgacgaggtcttctcctacgccaagcgcatcgccgcgccctacgaccttgtcatgcagaccaagcagctgggccgtctaccagtcgttcagtttgcggccggcggtgtggccacccccgccgacgctgccctcatgatgcagctcggctgcgacggcgtcttcgtcggctccggcatcttcaagagcggcgaccccgcgcgccgcgcccgcgccatcgtgcaggccgtcacccactacagcgaccccaagatcttggcggaggtcagcagcgggctcggcgaggccatggttggcatcaacctctccgatcctaaggtggagcgcttcgccgcccgctccgagtagcccatccatcatcattcatatccgccttatccttctttcgctatatatatatgctccttccttcgattaagtaataattacatctactatcatcgtcgtgataagaagaaaatgaattagacaccagccagccaggactttgttggcttggctcacttcccttcccttcccttcttggtgatgatgtaacatggaacagcacatgtatcgattaggagcatgtattgttatttttgctaattgctgtggactggatccatttctatggaaactgtcatacttcccgttc

SEQ ID NO: 288 - protein, 318 aa, Oryza sativa
MATDGTGVVTVYGSGTNGAALLEPSNHKSATFSVKVGLAQMLRGGVIMDVVTPEQARIAEEAGACAVMALERVPADIRAQGGVARMSDPGLIRDIKRAVTIPVMAKARIGHFVEAQILEAIGVDYVDESEVLTLADDAHHINKHNFRVPFVCGCRDLGEALRRIREGAAMIRTKGEAGTGNVVEAVRHVRSVMGDIRALRNMDDDEVFSYAKRIAAPYDLVMQTKQLGRLPVVQFAAGGVATPADAALMMQLGCDGVFVGSGIFKSGDPARRARAIVQAVTHYSDPKILAEVSSGLGEAMVGINLSDPKVERFAARSE

SEQ ID NO: 289 - DNA, 1757 bp, Oryza sativa
ggcttgtagtctccagccacacaaccgtaaaggtccacacctcttctcgcaaccacttgagccactcgcaagtctcaagccaaaatcatatcacagtcgccatggaactctcctcaacctcagcttctctcctgctcatcctcctgctcaccctcgtctacttcctctacctgcaccaggatcccaagaagaagcctcgcacccatggactcaagtcctaccccgtggtcggcacgctgccgcatttcatcaataacaaggaccgtttccttgagtggtcgaccggcgtcatgaagcgcagccccacgcacaccatgtcgttcaaggagctcggactcaccggcggcgtcatcaccgccaacccggccaacgtcgagcacattctcaaggctaactttggtaactaccccaagggcgagcttgccgtgtccttgctcgaggattttcttggccacggcatcttcaattccgacggcgaacagtggctatggcagcggaaggccgccagttacgagttcaacaagcgctcgctgaggaacttcgtggtggacaccgtccggttcgaggtcgtcgagaggctgctgccgctgctcgagtatgcggggcgccacggacggacgctggacgtgcaagacgtgcttgagcgcttcgcgttcgacaacatctgccgcgtggccttcgatgaggacccggcgtgcctcaccgaggagagcatggccgcgccccagagcgcggagttcgtgcgcgcgttcaacgacgcgcagaacgccatcttggaccggttcaactcgccggccaagtcgctgtggcgcatcaagaagctcttcaacatggagcccgagaggcggatgagggattcacttgccacgatccacggctacgcggagcggatcgtccgggagcgcagggagagaagggaggcccggctggagcgccgcgacgacttcctgtcgcgcttcgccgcgagcggcgagcacagcgacgagagcctccgcgacgtggtcaccaacttcatcctcgccggccgcgacacgacgtcttcggcgctgacctggttcttctggctactctccggccggcccgacgtggaagacaagatcgtgcgcgagatccgcgcggtgagacagtcgtcggccggcagcgagggaacgcgtggcgcgacgttcagcttggacgagctgagggacatgcagtacctccacgcggccatcaccgagtccatgcgtctgtatccgccggtacccttcgacacgcacagctgcaaggaggaggagttcctgccggacggcacgttcgcggggaaagggtggctggtgacgtactgcgcatacgccatggggcgcgtggaggacatctggggcgcggactgcgaggagttcaggccggagcggtggctggacgaggcgggcgcgttccggccggagagcacgttcaagtacccggtgttccacgcggggccgaggatgtgcctaggcaaggagatggcctacatacagatgaagtccatcgtggcgtgcgtgctcgagcagttcagcctccggtacgccggcgacgccaaggggcaccctgggctcgtggtcgcgcttacgctgcggatggagggtggcttgccgatgaaagtgacaatcagggagtaatcaaacaagcgtgatgctaggctagctggacttgtcgactccatactttatgtgtgtatcattgctctcgcttgtttggagaaataaaatagaactggtgtcgtgctccggttttttacc

SEQ ID NO: 290 - protein, 511 aa, Oryza sativa
MELSSTSASLLLILLLTLVYFLYLHQDPKKKPRTHGLKSYPVVGTLPHFINNKDRFLEWSTGVMKRSPTHTMSFKELGLTGGVITANPANVEHILKANFGNYPKGELAVSLLEDFLGHGIFNSDGEQWLWQRKAASYEFNKRSLRNFVVDTVRFEVVERLLPLLEYAGRHGRTLDVQDVLERFAFDNICRVAFDEDPACLTEESMAAPQSAEFVRAFNDAQNAILDRFNSPAKSLWRIKKLFNMEPERRMRDSLATIHGYAERIVRERRERREARLERRDDFLSRFAASGEHSDESLRDVVTNFILAGRDTTSSALTWFFWLLSGRPDVEDKIVREIRAVRQSSAGSEGTRGATFSLDELRDMQYLHAAITESMRLYPPVPFDTHSCKEEEFLPDGTFAGKGWLVTYCAYAMGRVEDIWGADCEEFRPERWLDEAGAFRPESTFKYPVFHAGPRMCLGKEMAYIQMKSIVACVLEQFSLRYAGDAKGHPGLVVALTLRMEGGLPMKVTIRE

SEQ ID NO: 291 - DNA, 1162 bp, Oryza sativa
  misc_feature (609)..(609): n is a, c, g, or t
  misc_feature (867)..(867): n is a, c, g, or t
tcttctcatcatctatatcacgatcgatcacaaagaggttaacagtaacacatggggttcggctcgagggagatggcctgcgcgctcgtggcgctggtgctcgggctctgctgcgtcggcggcgcacgggcgacggggaggatcgacgaggggctggaggtgatgtggggcgacggccgggggagcgtctcgccggacgggcaggtgatggcgctgtcgctcgaccacacctccggctccgggtggaggtccaagaacacgtacctgttcgcgcgcgtcgacctgcagatcaagctcgtcgccaacaactccgccggcacggtcaccacctgctacttcatgtcggaaggggagtgggatatccacgatgaggtggacctggagttcctcggcaacgtcaccgggcagccgtacacgctgcacaccaacgtcttcgccaatggcaccggcggcaaagagcagcagttccacctctggttcgaccccaccaccgacttccacacctactccatcgtctggacctcgcagcacatccttgtgctggtggacgggacgccgatccgggagatgaagaaccacgcggacaaggggatcgcctacccgtcgtcncagcggatgcggctgtacgggagcctgtggaacgccgacgactgggccacgcagggcgggcgcgtcaagacggactggtcgcaggcgccgttcgtcgcgcggtaccgcaacttcaccgccacggaagccgcgtcgtcgtcgtcgccggcagggtacgaccagcagatggacgccacggcgcagcaggcgatgaagtgggcgcgcgacaaatacatggtgtacgactattgcgccgacagcaagcggttcccgcagggnttcccgcccgagtgttccatgccgtagagtggagtggagacgcgccaaagcctcggtgcactttgatgaacgcggactcgatcgaactcacgcagggcacgcattgacctcgtttttttatttttacttctcttgattgaattgattcattctttctatgtaaagtagatatatatatatatatatatatatatatatatatatatatatatgtatatgtatgcacgaaagatttaaagaatggagtgtgaaagaaaaaatatgtttgcattgcaaaaaaaaaaaaaaaaaaaaa

SEQ ID NO: 292 - protein, 280 aa, Oryza sativa
MGFGSREMACALVALVLGLCCVGGARATGRIDEGLEVMWGDGRGSVSPDGQVMALSLDHTSGSGWRSKNTYLFARVDLQIKLVANNSAGTVTTCYFMSEGEWDIHDEVDLEFLGNVTGQPYTLHTNVFANGTGGKEQQFHLWFDPTTDFHTYSIVWTSQHILVLVDGTPIREMKNHADKGIAYPSSQRMRLYGSLWNADDWATQGGRVKTDWSQAPFVARYRNFTATEAASSSSPAGYDQQMDATAQQAMKWARDKYMVYDYCADSKRFPQGFPPECSMP

SEQ ID NO: 293 - DNA, 686 bp, Oryza sativa
atcacaggctagcaagctcgactgatcatctgaaatggctcgcaagaatctccttctgcttggtgtcttcctatctgctctgcttttcttcttcctggatgtagctcacgcaagagagctcgctgaagccagtgaatctgaggggaagaatgtgaagccaacaggtaggtcaggggtcgaggatcagaagtggggcggtgctcatggaggaggatatggatatggcggcgggtatggtggaggaggatatggtcatcctgggtatggtggtggctatggtggtggatatggccaccctggatatggcggtggctacggaggtggatacggccaaggatatggctgtgggtatggtcatcctggtcacagtggaggatatggtggtggttacggaggtggttatggtggaggatacggtggtgggggtggctacggtggtggtggaggttatggaggaggacatggtggtggttggccttaataggtattcgagtcatctaagtacaactgttaaataagtcaattatgacaaacttgtttgagtatgcatgctgctagtaggaacattgtatagtagcaagaaactagaagagcatcatgtttggtctcttcttatatatgtatgttccttccaacatgtattctggctttaagcataataatatggtatatctgaaaatatttat

SEQ ID NO: 294 - protein, 148 aa, Oryza sativa
MARKNLLLLGVFLSALLFFFLDVAHARELAEASESEGKNVKPTGRSGVEDQKWGGAHGGGYGYGGGYGGGGYGHPGYGGGYGGGYGHPGYGGGYGGGYGQGYGCGYGHPGHSGGYGGGYGGGYGGGYGGGGGYGGGGGYGGGHGGGWP

SEQ ID NO: 295 - DNA, 2170 bp, Oryza sativa
atgcctacacagtacacacagtgcgtttccattttgttctttcttccaacactttgggagagagctataccacgttgctctctcttgctttgcttgatttgcgtatcataatctttttataattcgtgctgtttaaaattttaattaggaggtgaattaaaagccgtcctcgtacgtacataaattagctggcgaatctggccagtctttaattctgccatatatgtgcatgtgtgtgtacatgtatggaaggatagtattctctccttaatttcttgaattgctatccgatcctgagcaatatatgtccctagctagctagctgggcgtccgccataatttgctgccaataataattagccccatatatccttgtagctaggtgaatcatccccttgatatgccttgttaaatatgtagctccgatttaagctctcttgcccattttttttcagagtttatagtttcattttgattcttccgctctctgctagcttccacacaccaagttcatcagccaatttcttcctgacgagaaggccgtgtaagaattttagtgaagtgagtgtcttttttgtttttcgattggtcgatcgagtgctggtacaagctagaggatggcgatgatggagaggattgaggtcaccaagcttcatcatcatcttcttcttcttgttcttcttctcgtcgtcgccgccgccggcggcggcagcgtacaggcggcggaggaggatgagatgagcggccggaggaggagaagcaggcggcggcgtgcggcggacgtgatggtgcccatcaccatcctcaactccgccgtcgacaagggagccgtgtgcatggacgggacgccgccggcgtaccacctggacccgggctccggcggcggcaaccggagctgggtggtcaacctggagggcggcgggtggtgcaacaacgcccgcacgcgccgcttccgcaccgccagccgccacggctcctccgaccacatggagcgccgcatcgccttcaccggcatcatgagctccgccgccgccgacaaccccgatttccacagctggaaccgcgtcaagatccgctactgcgacagcgggtccttcgccggcgacgccttcaacgagggattgaagctgcaattccgggggcagcgcatctggggggcggtgatccagcacctgctcgacgtcggcatggcctccgccgagcatgtgctgctcaccggctgctccgccggcggcctcgccgcgatcctccactgcgaccagctccgcgccctcctccccgccgccgccaccgtcaagtgcctctccgacggcggcctcttcctcgacgccgtggacgtcgccggcggcaggagcctgaggtcatactacggcgacgtcgtcggcctgcaggcggtggcgcccaaccttcccgagacctgcaccgaccatctcgacgccacctcgtgcttcttccctcagaacataatcgacggcataaagacacccatcttcctgctgaatgcggcgtacgacgtctggcagatcgagcagagcctggcccctaacgcagctgacaccagcggcacctggcgagtctgcaagttcaaccgcgcagcctgcaacgcgtctcagctgcagttcctgcaaggtttcagagatcagatggtggcagcggtgagagtcttctccgagtcgaggagcaacgggctgttcatcaactcgtgcttcgctcactgccagtccgagctgacggccacctggaatggtggctctcctgctctccagaacaagggaattgcaaagtctgttggtgactggtactttggtcgagctgaggtgaaggccatcgattgcccctacccctgtgacaaaacatgccacaacatcatatgacatcatgcactgacgtttactcgcctcgaccgaatggagtgacacacatttttgcctcgaagtcctctcaagttcttcactctagctagtagctatatacatgtagaactatcgagttcagagccaaaacatacaaaacagagaacctcacacaaacagatacaaaggaagcaaaacaaagttaacaaaagcaaataggaagggggagaggggcagggcacattaatatcgggaagcagtgtggtggagtcatgggtgtataatttcacctattaagaataaattacagtattcac

SEQ ID NO: 296 - protein, 418 aa, Oryza sativa
MAMMERIEVTKLHHHLLLLVLLLVVAAAGGGSVQAAEEDEMSGRRRRSRRRRAADVMVPITILNSAVDKGAVCMDGTPPAYHLDPGSGGGNRSWVVNLEGGGWCNNARTRRFRTASRHGSSDHMERRIAFTGIMSSAAADNPDFHSWNRVKIRYCDSGSFAGDAFNEGLKLQFRGQRIWGAVIQHLLDVGMASAEHVLLTGCSAGGLAAILHCDQLRALLPAAATVKCLSDGGLFLDAVDVAGGRSLRSYYGDVVGLQAVAPNLPETCTDHLDATSCFFPQNIIDGIKTPIFLLNAAYDVWQIEQSLAPNAADTSGTWRVCKFNRAACNASQLQFLQGFRDQMVAAVRVFSESRSNGLFINSCFAHCQSELTATWNGGSPALQNKGIAKSVGDWYFGRAEVKAIDCPYPCDKTCHNII

SEQ ID NO: 297 - DNA, 645 bp, Oryza sativa
atggagaaagccacaaagatgcaaaggcaaacttgcttacaacacaaagcacccaactccttgaaactaaaatccactgcctctttcctcctccacattgcaaaccttccaaaatccccctccctatcaaacatgcagcatgatgccatatccaacattgcataccatcctagcatggatttcacaagctttttcctgccgcaaaccgacgcttactcgcatgatctcagtgcattgctggacatggctgtggttgatccatacatcagctgcaatggcagcagcatcaccatgattccagtgactgaagatgaagcaaatgctcagccgatgaaccatggcaatgacgagaggaagaagagaaggctggtgtcaaaccgtgagtctgcaaggaggtcccgggtgaggaagcagaggcgcctggatgagctctcatctcaggtttcagagcttcgagacaccaaccagaggcttcttgttgagctgaatcacatgatctccaagcatgctcgcattgtcagggagaattcccagctcagagaagaagcttctgacctgcagagaaagctcagtgagatgaaaatggaagatgctgaagtagctgctgctgctgctgcagcaccacgaacattagaagtagcttaa

SEQ ID NO: 298 - protein, 214 aa, Oryza sativa
MEKATKMQRQTCLQHKAPNSLKLKSTASFLLHIANLPKSPSLSNMQHDAISNIAYHPSMDFTSFFLPQTDAYSHDLSALLDMAVVDPYISCNGSSITMIPVTEDEANAQPMNHGNDERKKRRLVSNRESARRSRVRKQRRLDELSSQVSELRDTNQRLLVELNHMISKHARIVRENSQLREEASDLQRKLSEMKMEDAEVAAAAAAAPRTLEVA

SEQ ID NO: 299 - DNA, 692 bp, Oryza sativa
cacagctcctcttggtcgccctcgtggcagctctgctcctggcgggcccacacaccaccatggccgccatcagctgcggccaggtcaactccgccgtgtcgccctgcctcagctacgcccgcggcggctcccgcccgtcggcggcctgctgcagcggcgtcaggagcctcaactccgccgccaccaccaccgccgaccgccgcaccgcctgcaactgcctcaagaacgtggccggcagcatcagcggcctcaacgccggcaatgccgccagcatcccctccaagtgcggcgtcagcatcccctacaccatcagcccctccatcgactgctccagcgtgaactaatccgatcgatcgctaccggaggatgacatgcagcgccggccgagatgcagctgtcgtctcacgctttgtatcttgtgttatctgtgtttatgctgaataaaatgagagctagctagctaggtcgatccatcgccatgcatacatggttgatcgcccggccggtcactacgctatctgtttccttaatttattcgtcgatcgactatacgtacctgagagctagagatcagtttttgtaccatatgcatatgtacttctgcatgtacatggagtactacttgtactacgtgcgtgtacgttgtggattatacatagatatatagctctttttcgtaaaaaaaaaaaaaa

SEQ ID NO: 300 - protein, 110 aa, Oryza sativa
LVALVAALLLAGPHTTMAAISCGQVNSAVSPCLSYARGGSGPSAACCSGVRSLNSAATTTADRRTACNCLKNVAGSISGLNAGNAASIPSKCGVSIPYTISPSIDCSSVN

SEQ ID NO: 301 - DNA, 953 bp, Oryza sativa
gacacacaaaacgcagaagcagctagcttcactgatccacattactaccagcttcttcttccaatcttcttctccgacgagcagctagccagctagcggcgccggccggcaatggcggacgaggtggtgctcctggacttgtgggtgagcccgttcgggcagcgttgccggatcgcgcttgcggagaagggcgtggagtacgagtacagcgagcagagcctcgccgacaagagcgacctcctcctccgctccaaccccgtccacaagaaggtccccgtcctcctccacgccggccgccccgtctgcgagtccctcgtcatcctcgagtacatcgacgagacatggccgccggagccggagaagaagaaggagtcgccgcgtctcctccccagcgacccctacgcccgcgcgcgtgccaggttctgggcggactacgtcgacaagaagctgttcgactgccagacacgcctctggaagctcagggccggcgacgccgcgcacgagcaggccaagagggacatggcggaggcgctggggacgctggaggcggagctcggggagggggactacttcggcggcgaggcgttcggctacctcgacgtcgtgctcgtgccgttcgtggcgtggttccacgcctacgagaggctcgcgggattcgccgtggcggagatctgcccgcggctggtggcgtggggggaacgatgcaaggggagggacagcgtcgccaagacgcttactgatcctgagaaggtgtacgagttcgcgctctacctcaaggccaagtttggcgccaagtagagtgagaattccagatttggtttggttaacaatcgcagcgtatgatctatatctattgttactgtatttggttatcgcgttgtgattttgctcctacctatcacctgtatgtatgtgcttgagcttcacgaataaattagaaagtgcagttgtgt

SEQ ID NO: 302 - protein, 228 aa, Oryza sativa
MADEVVLLDLWVSPFGQRCRIALAEKGVEYEYSEQSLADKSDLLLRSNPVHKKVPVLLHAGRPVCESLVILEYIDETWPPEPEKKKESPRLLPSDPYARARARFWADYVDKKLFDCQTRLWKLRAGDAAHEQAKRDMAEALGTLEAELGEGDYFGGEAFGYLDVVLVPFVAWFHAYERLAGFAVAEICPRLVAWGERCKGRDSVAKTLTDPEKVYEFALYLKAKFGAK

SEQ ID NO: 303 - DNA, 1853 bp, Oryza sativa; identical to SEQ ID NO: 166

SEQ ID NO: 304 - protein, 568 aa, Oryza sativa; identical to SEQ ID NO: 167

SEQ ID NO: 305 - DNA, 1483 bp, Oryza sativa; identical to SEQ ID NO: 168

SEQ ID NO: 306 - protein, 90 aa, Oryza sativa; identical to SEQ ID NO: 169

SEQ ID NO: 307 - DNA, 776 bp, Oryza sativa
gttccaccgctagaaatcgcaacgcacgcagctaggaaatctgcagcgagcgagcgagctcatcttgatcgcattgcatctgcactgcaaacgatcgaatcgaatcgaatcggccgaggcatttcacgctgaacacgatgacgaaggtgagggaaactgttcgattagttgcttcgcatgcatgcagcttaattagttttgatgatccactgatgaatcagtttcttattgggggcgtggttgaataatgcagcaaaagatcgtgatcaaggtgagcatgccgtgcgagaagagccggtccaaggccatggcgctggtggcgagggcgtccggcgtgaactcgatggaggtcaccggcgacggcaaggaccggctgcaggtggtcggcgacggcgtcgacccggtctgcctcgtcgcctgcctccgcaggaagatcggctacgccgagatcgttcaggtggaggaggtgaaggacaagaagccggaggagaagcagccggagccacccaagcccgtgccatgctactacccagctcctccctgctactacccgccggcgacggtggtctgcagcgacgagccgagcccctgctccatcatgtaaatcaatcatagagttcgatcgatcgagttttgcagtaatttcttcagcaattgatcagtagtacagtacatcgatcgagtgaacgaaatatatcatttgctgtttcctcacttaattggaaatgaaaactacaacacttggatatatcatttgctgtttcctcgcttgctgt

SEQ ID NO: 308 - protein, 118 aa, Oryza sativa
MQQKIVIKVSMPCEKSRSKAMALVARASGVNSMEVTGDGKDRLQVVGDGVDPVCLVACLRRKIGYAEIVQVEEVKDKKPEEKQPEPPKPVPCYYPAPPCYYPPATVVCSDEPSPCSIM

SEQ ID NO: 309 - protein, 569 aa, Oryza sativa
ATCCAACCATCACACACAGTTAGCATATCAGTAGTCGTTCACAGTTAGCATATCAGTGCATCATAAACTTGACCTTGGCTCGATCGTACAATCCATCACAACTAAAGATAGTGGAAATGGGGCACCACCACAAGAACGACGACAAGGCCGCGGCGGCGGCCGGCGGCGACCACCGCAAGGAGGAGAAGCACCACAAGCACATGGAGCAGCTTGCCAAGCTCGGCGCCGTCGCCGCCGGAGCATACGCCATGCACGAGAAGCACAAGGCGAAGAAGGAACCGGAGAATGCGCGGTCGCACAGGGTGAAGGAGGAGATCGCCGCCACCATCGCCGCCGGCAGCGTCGGCCTCGCCATCCACGAGCATCACAAGAAGAAGGAAGCTAAGAAGCATGGCCATCACCATTAGCTACCTACCCTATCACTACTTACTGGACTAGTGTGTCTATTTATTTGATTATTACCATGCATGTACTCTTAGCTAGCATATCGGCTGTATTTTTGTCGACGGATACATGTACATCATCTATCTATTTTTCTTAATAATAATGTGATTGATTGTGTTACAGTT

SEQ ID NO: 310 - protein, 96 aa, Oryza sativa
MGHHHKNDDKAAAAAGGDHRKEEKHHKHMEQLAKLGAVAAGAYAMHEKHKAKKEPENARSHRVKEEIAATIAAGSVGLAIHEHHKKKEAKKHGHHH

SEQ ID NO: 311 - DNA, 1629 bp, Oryza sativa; identical to SEQ ID NO: 199

SEQ ID NO: 312 - protein, 415 aa, Oryza sativa; identical to SEQ ID NO: 200

SEQ ID NO: 313 - DNA, 2380 bp, Oryza sativa
acaacaccaaaccataagaacatactcctcgaaatcaaacatggactcgagatcaccttttcttcctactctgcacttgattcttgtactggtagtggtactccccattttcgccgatgcgtccagcagactctacattgtttacatgggggagaagaagcatgacgatccatctgtggtcaccgcatcgcaccatgatgctcttacttcggtttttgggagtaaggatgaagccatgaaatctatagtctacagctacaagcacggattctctggattcgctgcaatgctcaccgaatcccaagctgaagaacttgcaaaattacctggagttgtcagtgtaaaacctaacacttatcataaagcacacacgacccggagctgggattttcttggacttaattactatgaacaatcaaatctcctgaagaaggcaaactatggtgaagatgtcattgttggcgtcatcgattcagggatatggcctacatcacgaagctttgatgtaacggctatggccctgtgccagcacgatggaaggggaagtgccagactggcgcggagttcaacaccacgagttgcaaccggaagatcatcggtgcgcgctggtactccggcgacatcccggacgactttctcaaaggtgagtacatgtcaccaagggatcttagcggacacggcacgcacactgcctcgacgatcgtcggcgggcaggtgtggaacgtgagccaccggcagagcggcctggccgcgggcatggcccgcggaggtgcgccgcgggcgaggctggcggtctacaaggcttgctggggtgacagcaactccacgtgtggcgacgcgtccgtcctcgcggccatcgacgacgccataaacgacggcgtggacgtgctgtcgctgtcgctgggagggtacggtgaggtcgccgggacgctgcacgccgtggcgagggggatcaccgtggtgttcgccggcgggaacgagggccccgtgccacagtccgtgtcgaacgccgtgccgtgggtcatcacggtggccgctagcaccatcgatcgctcgtttccaaccgtgatatcgctcgggaacaaagagaagcttgtgggacaatctcttaactacaattcaacgatgaacagcagcaactttcatatgctcgtcgatgggaaaagatgcgacgagttgtcactggcatcggtcaacatcaccggcaagatcgtcctgtgctcggcgccgttggaggcagcgaactcgtcaccaaacaacgcgttcatcgccacactagccgccgtcgtgaagagacgcgcgaagggtctcatctacgcgcagtacagcgccaacgtcttggatggcttggaagacttctgccacctgtatctgccggctggtcgactacgaaatcgcaagcagaatcgcctcctacgcgaaaagcacaaggaaatctgtcgtgaagatatctcgggtggtgagcgtggttgggaatggggtactcgcaccgaggatcgccatgttctcgtcgagaggcccgagcaatgagtttcctgccatcctcaagcctgacatatctgcacctggagtcagcatcctggctgctgtgggcgactcatacaaattcatgtctgggacgtccatggcatgcccgcatgtctcggcggtggcggcgctgctcaagtcagttcacccggactggtcgccggccatgatcaagtctgccattgtcaccacagcatcggtgaccgatcgttttggcatgccaatccaagctgagggagcacctaggaagatcgccgaccccttcgactttggtggtggccagatcgacccagacaagtccattgaccctgggcttgtctatgacattgacccgaaagaatacactaagtttttcaactgcaccctcactcttggccctaaggatgactgtgagtcctatgtgggtcagctctatcagctcaaccttccgtccatcgtcgtaccagaccttaaggactctgttacggtttggcgcactgtaaccaacgtcggaggggaagaaggaacttataaggcatcgattgaggctccagctggtgtgaggatatctgttgaaccttcaattatcacattcaccaaaggtggtagtagaaatgcaacattcaaggtgacattcacagcaaggcagagagtacagtctggctacacgtttggaagcttgacatggctagatggtgtcacacactcggtgaggattccaatagtggttcgcaccataatccaagactttgtttcagatacttcgtaaatagtttcggaaaaaaataaatacgattgtgcaatattactttatactattattttcattcaaatgtaacgggaccaatgtgagccaataccatttatacaaaat

SEQ ID NO: 314 - protein, 310 aa, Oryza sativa
MAWKTSATCICRLVDYEIASRIASYAKSTRKSVVKISRVVSVVGNGVLAPRIAMFSSRGPSNEFPAILKPDISAPGVSILAAVGDSYKFMSGTSMACPHVSAVAALLKSVHPDWSPAMIKSAIVTTASVTDRFGMPIQAEGAPRKIADPFDFGGGQIDPDKSIDPGLVYDIDPKEYTKFFNCTLTLGPKDDCESYVGQLYQLNLPSIVVPDLKDSVTVWRTVTNVGGEEGTYKASIEAPAGVRISVEPSIITFTKGGSRNATFKVTFTARQRVQSGYTFGSLTWLDGVTHSVRIPIVVRTIIQDFVSDTS

SEQ ID NO: 315 - DNA, 1896 bp, Oryza sativa
gaaagttttcaggcatctgaagttttggacttgcaacacactctgctttcaagttctgaactagcattctactctgttctagctgactaggtcacacatggctatcaaggatgagcagcagccactgcacatcctcttcttcccattcctcgcgcccggtcatctcatcccgatcgccgatatggccgctctgttcgccgctcgtggcgtcaggtgcaccatcctcaccacccctgtcaacgccgccgtgatccgctcggccgtggaccgtgccaacgactcgttccgtcgcaacaacggcggcctggcgatcgaactcaccgtcgtgccatttccggacgttgggctcccgccgggcttcgagagtggcacggcgcttacgacccaggacgaccgtgacaagttcttccttggcattaggctgctccatgagcccttcgaccggtacctgtcggagcaccacgtcgacgccgccgtggtggacagcttcttcaggtgggccgcggacgccgccgccgagcacggcgtcccgcggctggggttcctcggcaccagcgtgttcgcgagggcctgcaccaacagcatgctgcgcaacaacccgctggagaccgcccccgacgaccccgacgccgtcgtgcccctgccgggcttgcctcactgcgtcgagctgaggcggagccaaatgatggacccgaagaagcggccggaccactgggagaagttccagagcttagacgccgccgaccagaggagcttcggcgaggtgttcaacagcttccacgagctggagccggactacgtcgagcactaccgcacgacgctcggccgccgcgtgtggctcgtcgggccggtcgctcttgcgaacaaggacgtggcggtgcgaggtaccagcgagctctcgccggacgccgacggctacctgcggtggctcgacgcgaagccacgcggctcggtggtgtacgtctccttcggcacgctatccagcttctcgccggcggagatgcgggagctcgcccgaggactcgacctctccggcaagaacttcgtgtgggttatcaacggcgcggacgccgacgcgtcggagtggatgcccgagggcttcgccgagctgatcgcgccgcgcggcgaacgcggcctcaccatccggggctgggcgccgcagatgctcatcctgaaccacccggccgtcggcgggttcgtgacgcactgcgggtggaactcgacgctggaggccgtgaccgccggcgtgccgatggtgacgtggccacggtacgccgaccagttctacaacgagaagctcatcacggaggtgctcgaggtgggtgtcggcgtcggctccatggacttcgcgtcgaagctggagaaccgccgggtgatcatcggcggcgaggtggtcgcgggagccatagggagagtgatgggcgacggcgaggagggcgaggcgatacggaaaaaggcgacggagctgggcgtgaaggcgaggggcgcgctggagaagggtgggtcgtcgtacgatgatgttggaattctgatggacgagttgatggctcgccggggctccgtcaatgtgtgacagcactccctaacaaggtgattgacggcttgacgcatcaagaagatggtgatcggacattcggacatctccagagtccagactattgtctttttcctcagagttttttttttttggagtaactatatttatggcgccatatttttcatcaaaaaatagtcggtatatatttacattgtaaatttctaaattacatatgtaattttagtgtatttacaatataagtcataaaattacatatgtaagtctctaaattacatatgtaagtataatgtaattataatgtaagtgcaatgtaatttctatattttgcattgaaaatt

SEQ ID NO: 316 - protein, 491 aa, Oryza sativa
MAIKDEQQPLHILFFPFLAPGHLIPIADMAALFAARGVRCTILTTPVNAAVIRSAVDRANDSFRRNNGGLAIELTVVPFPDVGLPPGFESGTALTTQDDRDKFFLGIRLLHEPFDRYLSEHHVDAAVVDSFFRWAADAAAEHGVPRLGFLGTSVFARACTNSMLRNNPLETAPDDPDAVVPLPGLPHCVELRRSQMMDPKKRPDHWEKFQSLDAADQRSFGEVFNSFHELEPDYVEHYRTTLGRRVWLVGPVALANKDVAVRGTSELSPDADGYLRWLDAKPRGSVVYVSFGTLSSFSPAEMRELARGLDLSGKNFVWVINGADADASEWMPEGFAELIAPRGERGLTIRGWAPQMLILNHPAVGGFVTHCGWNSTLEAVTAGVPMVTWPRYADQFYNEKLITEVLEVGVGVGSMDFASKLENRRVIIGGEVVAGAIGRVMGDGEEGEAIRKKATELGVKARGALEKGGSSYDDVGILMDELMARRGSVNV

SEQ ID NO: 317 - DNA, 2895 bp, Oryza sativa; identical to SEQ ID NO: 189

SEQ ID NO: 318 - protein, 964 aa, Oryza sativa; identical to SEQ ID NO: 190

SEQ ID NO: 319 - DNA, 3051 bp, Oryza sativa
gaagaacagatgccatcctgagcttctagctcgcgagtgatctcttcttctagctcagtaaccacagctacaacctacagcttacagtgtccgcaaaattgtaacattgtgtccttccatcggcaacaatggcggcctcggtggagtacaagctggctccgcacccgtgggcgagcaatgctccgtcgagcaacctcgacttgttcccgtccggcggcggcaagcgccgttcgggctccgagaccgactccgacgacgaggacagcataccaccggactggaggtcgctgtaccacccgcggctggaggtggcggagccggccgtcaaggacccccgcgacgaggccacctccgacgcgtgggtgcgtcgccacccggcgctcgtccggctcaccggcaagcacccgttcaactccgagccgccgctgccgcgcctcatgtcgcacggcttcatcacgccggcgccgctccactacgtgcgcaaccacggcgccgtgcccaaggcggactggtcgacgtgggccgtggaggtgaccgggctcgtcaagcgccccgcgaggctcaacatggagcagctcgtgaccgggttcgaggccgtggagctccccgtcacgctggtgtgcgcgggcaaccggcgcaaggagcagaacatggtgcgccagaccgtgggcttcaactggggccccggcgccatctccacctccgtgtggcgcggcgtgcggctgcgcgacgtgctgcggtggtgcggtgtcatgggcgcctccgccggcgcggccaacgtgtgcttcgagggcgccgaggacctcccaggcggcggcgggtgcaagtacggcaccagcctgcgccgcgaggtggccatggaccccgcccacgacgtcatcctcgcctacatgcagaacggcgagccgctcacgcccgaccacggcttccccgtccgggtcatcgtcccgggcttcatcggcggccgcatggtgaaatggctcaagcgcatcatcgtcgcgtccagcgagtcggagagctactaccattaccgcgacaaccgcgtcctcccgtctcacgtcgacgccgagctcgccaatgccgaagcttggtggtacaagccggagtacatgataaacgagctgaacataaactcggtgatcaccacgccgggacacgatgaggtgctccccatcaatgcgctgacgacgcagcggccgtatacgatgaagggatacgcctactccggcggtggccggaaagttacaagggtagaggtgaccctggacggcggcgagacgtggcaggtgtgcaaccttgaccacccggagaggccgaccaagtacggaaagtactggtgctggtgcttctggtccgtcgatgtcgaggtgctcgagctgctcgccgccaaggagatcgccgtccgcgcctgggacgagtccctcaacacccagccggagaagctcatttggaatctcatgggcatgatgaacaactgctggttcagggtgaagacgaagacgtgcaggccgcacaagggggagatcgggctggtgttcgagcacccgacgcagccgggcaaccaggccggcgggtggatggcgaggcagaagcacctcgagacgtcggagagcgcggtgagcacgctgaagcgcagcacgtccacgccgttcctcaacacggccaccacgcagtacaccatgtccgaggtgcgccgccacacgacgccggagtccgcctggatcatcgtgcacggccatgtctacgactgcacggggttcctcaaggaccaccccggcggcgccgacagcatcatgatcaacgccggcaccgactgcaccgaggaattcgacgccatccactccgacaaggcccgtggcctcctcgagatgtaccgcatcggcgagctcatcgtcaccggcagcgactactcgccgcagagcagcagtgctgacctcacgtccatcgttgagagccctacggcagcggcggcgcccgccgtgccggtgtcgaccgtcgcgctgtccaacccgcgggagaaggtgaaatgccggctcatggacaagaagagcctgtcctacaacgtgcgcctgttccggttcgcgctgccgtcgccggaccagaagctcgggctaccggtcggcaagcacgtgtacgtgtgcgcgtcgatcggcggcaagctctgcatgcgcgcgtacacgccgacgagctccgtcgacgaggtcggctacatcgagctcctgatcaagatatacttcaagggcgaggaccccaagttccccgacggcgggctcatgtcgcagtacctggactacctgccgctcggcgccaccatcgacatcaagggcccgatcgggcacatcgagtacgccggccgcggcgccttcacggtgaacggcgagcgccggttcgcgcggcggctcgccatggtggccggcgggacggggatcacgccggtgtaccaggtgatccaggccgtgctctgggaccagcccgacgacggaacggagatgcacgtggtgtacgcgaaccggacggaggacgacatgctcctccgggaggagatcgaccggtgggcggcggcgcacccggcgcggctcaaggtgtggtacgtggtgagcaaggtggcgcggccggaggacgggtgggagtacggcgtggggagggtggacgagcggacgctcagggagcacctgccgccgggcgacggcgagacgctcgcgctcgtgtgcgggccgccggcgatggtcgagtgcacggtgcggccgggcctggagaagatgggctatgacctcgacaagtcctgcctcgtcttctgaaacgtgacgtgtgtagtgtacgacactgcaaaaactgtacatatacgtagcatagttgcataaattttaattcaaagtttggagctctctcgagttccggtacatcggagtagcgcgcggcggtcgcattcgatggccatggaaaaagtgtagagtgtagattgatggatggttgtgcacatggttcatttgagaatcaagatgtatatttcattggtcatactagagcaaataaaaccgagatattactacg

SEQ ID NO: 320 - protein, 889 aa, Oryza sativa
MAASVEYKLAPHPWASNAPSSNLDLFPSGGGKRRSGSETDSDDEDSIPPDWRSLYHPRLEVAEPAVKDPRDEATSDAWVRRHPALVRLTGKHPFNSEPPLPRLMSHGFITPAPLHYVRNHGAVPKADWSTWAVEVTGLVKRPARLNMEQLVTGFEAVELPVTLVCAGNRRKEQNMVRQTVGFNWGPGAISTSVWRGVRLRDVLRWCGVMGASAGAANVCFEGAEDLPGGGGCKYGTSLRREVAMDPAHDVILAYMQNGEPLTPDHGFPVRVIVPGFIGGRMVKWLKRIIVASSESESYYHYRDNRVLPSHVDAELANAEAWWYKPEYMINELNINSVITTPGHDEVLPINALTTQRPYTMKGYAYSGGGRKVTRVEVTLDGGETWQVCNLDHPERPTKYGKYWCWCFWSVDVEVLELLAAKEIAVRAWDESLNTQPEKLIWNLMGMMNNCWFRVKTKTCRPHKGEIGLVFEHPTQPGNQAGGWMARQKHLETSESAVSTLKRSTSTPFLNTATTQYTMSEVRRHTTPESAWIIVHGHVYDCTGFLKDHPGGADSIMINAGTDCTEEFDAIHSDKARGLLEMYRIGELIVTGSDYSPQSSSADLTSIVESPTAAAAPAVPVSTVALSNPREKVKCRLMDKKSLSYNVRLFRFALPSPDQKLGLPVGKHVYVCASIGGKLCMRAYTPTSSVDEVGYIELLIKIYFKGEDPKFPDGGLMSQYLDYLPLGATIDIKGPIGHIEYAGRGAFTVNGERRFARRLAMVAGGTGITPVYQVIQAVLWDQPDDGTEMHVVYANRTEDDMLLREEIDRWAAAHPARLKVWYVVSKVARPEDGWEYGVGRVDERTLREHLPPGDGETLALVCGPPAMVECTVRPGLEKMGYDLDKSCLVF

SEQ ID NO: 321 - DNA, 1215 bp, Oryza sativa
ggaggcctctcctcgacgtcgcccgtacattctccagccgcgccatcgttctttcacttcacccccaatgttgttctagcccccgcgccacccaagatagatagattcatcgcgatcgatcgagcgggaggtagagactagagagggatagtgtgtgctgctgctgctgcgtcggagtaggatatcgcgatcgatcggtcgatcgggcggatgcagcaggggagggggaggaggaggatgatgcagggatcgtcgtactacgccgtgctcggcgttcaccccggcgcgtccgccgccgagatacgcgccgcgtaccaccgcctcgccatgaagtggcacccggacaagatcaccagcggccgcgtggatgcggaggaagccaagagcaggttccagcaggtgcacgaggcgtaccaagtgttgtctgacgagaagaggagggcgctctacgactcaggcatgtacgacccgctcgacgacgaccaggaggaggacgtcgagggcttccacgacttcctccaggagatggtgtccctcatggccacggtaggaagagaggagcccgtgtactgcctggacgagctccgctccatgctggacgggatgatgcaggatttcgcctcgtccgaattgccttcgcccagcggcggcttcttcgccggcgcgccctcctcgccgttcgccgacaccggcgccgcgcagcagcagcgcggggtcggctccgcctccgcgcgcgcgcacgctcatccccaggtggtcggcaactctgcctgcctcagccggatggccttctccagctactgagatcaatttttgccagcggccgcaacatcatcacctgcatagattagctagcctcgtcgacatcgagtgagagtgagtagtcggcggcggtgcggcgccgccccctgctgccgatgaggcgcgtcagcgtcgtgatctcatgaaggtgcatgcagaaaggtggcaaggcagggcactggaacaaagtatttctgtttattttcttgtcttgtttcgatgggatgggctctgcagcgagaactgtctatactgttccgagtgtaccgtgacaatgtgatatcacgggactgtttgcctttgtacagtttcatgataaacaatctgaagtagtagtaatgaactagtgacaatgatgatgatgatcgtcgttgttccgttctgttaggatgatgggacgatccctttggtgtg

SEQ ID NO: 322 - protein, 197 aa, Oryza sativa
MQQGRGRRRMMQGSSYYAVLGVHPGASAAEIRAAYHRLAMKWHPDKITSGRVDAEEAKSRFQQVHEAYQVLSDEKRRALYDSGMYDPLDDDQEEDVEGFHDFLQEMVSLMATVGREEPVYCLDELRSMLDGMMQDFASSELPSPSGGFFAGAPSSPFADTGAAQQQRGVGSASARAHAHPQVVGNSACLSRMAFSSY

SEQ ID NO: 323 - DNA, 2252 bp, Oryza sativa; identical to SEQ ID NO: 207

SEQ ID NO: 324 - protein, 637 aa, Oryza sativa; identical to SEQ ID NO: 208

SEQ ID NO: 325 - DNA, 876 bp, Oryza sativa; identical to SEQ ID NO: 160

SEQ ID NO: 326 - protein, 291 aa, Oryza sativa; identical to SEQ ID NO: 161

SEQ ID NO: 327 - DNA, 1637 bp, Oryza sativa
gaagtgcaaacgtgcagcagcagaggcagcaacacctcccctgttcttgctctgtttcctcactctgttggtacacaacaaaaagaagaagcttaattaggtggtttttgatctgatcacgcgccatggtggcgatcacggcgccgagctccatcgagcacatcccgctggtgaggtgccccaagggcgccaatgccgggccgcaagctgtcatcccgtgcatcgacctgtcggcaccgggcgcggcggcggcggtggccgacgcgtgccgcaccctggggttcttcaaggcgaccaaccacggcgtccccgcggggctcgccgacgcgttggagtcgagcgccatggcgttcttcgcgctcccgcaccaggagaagctcgacatgtccggccccgcccggcccctcggctacggcagcaagagcatcgggtcgaacggcgacgtggggtggctggagtacctcctcctctcggccggcgccgcctcgtccggcggcgcggcgctgccggcggcgctgagggcggcggtggaggcgtacacgggggcggtgaggggggtggggtgcagggtgatggagctgatggcggaggggctggggctgggggcgtcggaggaggggaggtgcgtgctgcggcggatggtggtggggtgcgagggcagcgacgagatgctgcgggtgaaccactacccgccgtacctcctcccgccgggccgcgaccgggacgagtgcggcgtgacgggcttcggggagcacacggacccacagatcatctccgtgctcaggtccaactgcaccgcgggcctccagatcctcctccgcggagactactcctcccctgcccgctgggtccccgtgccccccgaccccgattccttcttcgtcaacgtcggcgactccctccaagtgttgacgaatgggaggttcaggagcgtgaagcacagggtgttggcgccggagggggaggagtcgaggctgtcggtgatctacttcggcgggccagcggcgtcgcagcggatcgcgccgctggagcaggtgatgcgggagggggagcagagcctgtacagggagttcacctggggggagtacaagaaggccgcctacaagacgcgcctcggcgacaaccgcctcggcccctacgagctgcagcacgccgctgccaacgatgaggccgcgacgaagaaataaatcgatcaacccgacgactgtgaacaactgtgaagtgttactgtactagtgtagttagctccgtggtactggtagctgtgaatatgatcgagatcgatcgatcgatcgatctatccttgtgttgtgttacttttaacccatttctggtaactaaaggccgccgttgccttggcttgcttggccagcccaaaactggcactggcgagctgcctcctcctgcatgcctctgctgtgcagtagtgcagcagtactcctctgtcctggggttttctgcagcagagcagtggagtgcagttcagtgcagcgttgtgcatgttgtgtaaaatagcttgccgcatgcatatgtgattatgtgctgctcctgtcgacgctgccgccccttttgtagcatggtttttaccggctgggcggtcggcaggtgcagtagtagctaatgatgcttactgcgcc

SEQ ID NO: 328 - protein, 353 aa, Oryza sativa
MVAITAPSSIEHIPLVRCPKGANAGPQAVIPCIDLSAPGAAAAVADACRTLGFFKATNHGVPAGLADALESSAMAFFALPHQEKLDMSGPARPLGYGSKSIGSNGDVGWLEYLLLSAGAASSGGAALPAALRAAVEAYTGAVRGVGCRVMELMAEGLGLGASEEGRCVLRRMVVGCEGSDEMLRVNHYPPYLLPPGRDRDECGVTGFGEHTDPQIISVLRSNCTAGLQILLRGDYSSPARWVPVPPDPDSFFVNVGDSLQVLTNGRFRSVKHRVLAPEGEESRLSVIYFGGPAASQRIAPLEQVMREGEQSLYREFTWGEYKKAAYKTRLGDNRLGPYELQHAAANDEAATKK

SEQ ID NO: 329 - DNA, 852 bp, Oryza sativa
gatccatcgatctccccccaaccaaaaatctctctctcaatccatcgatccattaattcacaagcttatcgaatcggggatgaagcacccgaggcaggaggaggaggtgtcgctggcgctggcgctgagcacggactgctcgtcgacggcgtcggactcgtcggcggcggcggcgggcggcgcggcgaggaggaagagggcgcggcggaggagcgtggtggcgacgtcgggggaaggggagttcgtgtgcaagacttgcagccgcgcgttcccgaccttccaggcgctcgggggccaccggaccagccacctccgcggccggagcaacgggctcgacctcggcgccatcggcgacaaggcgatcaggctgcacagggcggccgacaaggagcacagggacaagcacgagtgccacatctgcggcctcggcttcgagatgggccaggcgctcggcggacacatgcggcgccaccgcgaggagatggccgccgccggcggtggatcctccgccgacgactgggtctggcgctgcgacgcgcggccggaggggatcgccgccgagccaccggtgttgctggagttgttcgcctagttaccgctggtctccattagtttcgtccaagttttgaactgacgcagtgtgtgtcaccattaattagttcatgtacatgtctagaaaaaaaaagtcaggttcatcgatcttgtaactatgataggggtttaatttttttttcattagcgtttgggttgttcggttttgaatcggtcagtttttgaaccgtttggtggagatttgttgagttcagatgtatatacacacacagatgtaatataattctttcattcatagcc

SEQ ID NO: 330 - protein, 170 aa, Oryza sativa
MKHPRQEEEVSLALALSTDCSSTASDSSAAAAGGAARRKRARRRSVVATSGEGEFVCKTCSRAFPTFQALGGHRTSHLRGRSNGLDLGAIGDKAIRLHRAADKEHRDKHECHICGLGFEMGQALGGHMRRHREEMAAAGGGSSADDWVWRCDARPEGIAAEPPVLLELFA

SEQ ID NO: 331 - DNA, 1241 bp, Oryza sativa
aagaggaagcggatcaggtggagaggaagctggtgctggggcggtacgagctcgggaggctgctggggcagggcacgttcgccaaggtgtactacggccgtgacctccggtccggtgagagcgtggcgatcaaggtgatcgacaaggcgcggctccgtcgcacggaagggatggtggagcagctgcggcgtgagatctccatcatgcggatggtgcgccaccccaacgtggtggggatccgcgaggtgctcgccagccgcgcccgcgtgttcgtcgtcatggagtacgcccgcggcggggagctgttcgccaaggtggcgcgcgggcggctcaccgaggagcacgcgaggaggtacttccagcagctcgtcgccgccgtcgggttctgccacggccgcggcgtcgcgcaccgggacctcaagcccgagaacctgctgctcgacgaggaggggcggctcaaggtcaccgacttcggcctcgccgcgctgcccgagcagctgcgacaggacggcctcctccacacgcagtgcggcaccccggcgtacgtcgcgcccgaggtgctccggaagcgcggctatgacggcgcccgcgccgacctctggtcctgcggcgtcgtgctctacgtgctcctctgcggcttcctcccgttccagcacgagaactacgccaagatgtaccagaagatcttcaaggcggagtaccaggtgccgccgtgggtgtccggcgacgcgcgccgcctcatcgtccgcctgctcgtcgtcgacccggccaagcgcatctccatcccggagatcatgcgcacgccatggttcaagaagggcttcgtgccgcccgtccccacctcccctgtctcccccaagaaatgggaagaagacgatgtcctcctcgacggcggcgactccggcgccatgtcgccccggacgtgcaacgcgttccagctcatatcctccatgtcctccgggttcgacctgtcggggatgttcgagagcgagcagaaggccgccacggtgttcacgtcgcgcgcgccggcggccaccgtcatccagaagctggaggccgtggggcgatcgctgggttacagcgccacgagagggaaagggtggaagctgaggttggaggcgacggcgtccgttcagcgcgacgtgaaatctgtaggatgtattagctttagcttctttgctcgcggttatgtacaggccaaatcgagagatgtgtaaatacaaaagttttgttacttgatc

SEQ ID NO: 332 - protein, 348 aa, Oryza sativa
MVEQLRREISIMRMVRHPNVVGIREVLASRARVFVVMEYARGGELFAKVARGRLTEEHARRYFQQLVAAVGFCHGRGVAHRDLKPENLLLDEEGRLKVTDFGLAALPEQLRQDGLLHTQCGTPAYVAPEVLRKRGYDGARADLWSCGVVLYVLLCGFLPFQHENYAKMYQKIFKAEYQVPPWVSGDARRLIVRLLVVDPAKRISIPEIMRTPWFKKGFVPPVPTSPVSPKKWEEDDVLLDGGDSGAMSPRTCNAFQLISSMSSGFDLSGMFESEQKAATVFTSRAPAATVIQKLEAVGRSLGYSATRGKGWKLRLEATASVQRDVKSVGCISFSFFARGYVQAKSRDV

SEQ ID NO: 333 - DNA, 1408 bp, Oryza sativa
agcttcgacgccgagcacaccgacacggcgctcgagcgctacgtccccttcgtcatggccacggcggagcagctccagcggcgggagcgcgtgctcaggatcttcatgaacgaggtgcgctcgtggcacggcttcaaccaccaccacccggcgacgttcgacacgatcgccatggaacccgacctcaagaagtccatcgtcgacgacctcgaccgcttcctgaagcggaaggagtactaccgccgcatcggcaaggcgtggaaacgcgggtacctcctccacggcccgcccggcaccggcaagtccagcctcgtcgccgccatggccaactacctccgcttcaacctctacgacctcgacctctccgaggtgcgcgtcaacgccgcgctgcagcgcctgctcatcagcatgcccaacaaatccatcctcgtcatcgaggacatcgactgctgcttcgacgccaacccaagagaagcccacaagatcaccacggcggcgctcgaccaggccgaggacttcgacttctcctcgtcggactccgacgacgccgtcggcgcgccgcccagagcgcgccgcgcgggagatctccagcagcagaagctgacgctgtccgggctgctcaacttcatcgacgggctgtggtccacgagcggcgaggagcgcgtcatcgtcttcaccacaaactacaaggagcgcctcgatccggcgctgctccggccggggcggatggacatgcacgtctacatgggctactgcggctgggaggcgttcaagacgctcgcgcacaactacttcctcgtcggcgaccacccgctgttcccggagatacggcagctgctcgccggcgtggaggtgacgccggccgaggtgtcggagatgctgctgcgcagcgaggacgccgacgccgcgctccggggcctcgtggagttcctccgtgagaggacgcggcggagggcaagacaagaggcagcgatcgacgacaaccaagtggtagcagaaaaaggcaatgcagcttaacaaatcttcagagaatttacttcacaataacgagatgagatgattgggttgcatgatcacgacagtagcaaacttggtactagtagtacttactgaattaataatcatttgtcatgctcactataatttctgttgcaaatctgcaagcaatggcatagctaggcaaggcaacagagaacagaagagagtgcagagcgtctggtcatggattaactgttgctttctgaaaagctgggcttatcttaaaacaaatgatgagctgtggttttagtttcaaccccagcctaacttaacagagtagcatataaacatatgacaggaaactactccgcgttggaggggtaagaaatgggactctgcattttctgaataatgagacactttctgaatc

SEQ ID NO: 334 - protein, 320 aa, Oryza sativa
MATAEQLQRRERVLRIFMNEVRSWHGFNHHHPATFDTIAMEPDLKKSIVDDLDRFLKRKEYYRRIGKAWKRGYLLHGPPGTGKSSLVAAMANYLRFNLYDLDLSEVRVNAALQRLLISMPNKSILVIEDIDCCFDANPREAHKITTAALDQAEDFDFSSSDSDDAVGAPPRARRAGDLQQQKLTLSGLLNFIDGLWSTSGEERVIVFTTNYKERLDPALLRPGRMDMHVYMGYCGWEAFKTLAHNYFLVGDHPLFPEIRQLLAGVEVTPAEVSEMLLRSEDADAALRGLVEFLRERTRRRARQEAAIDDNQVVAEKGNAA

SEQ ID NO: 335 - DNA, 2241 bp, Oryza sativa
gatcccatccacgcaaatatttcttcctataacaggacaagagcagatcgatcgtttcctttttatttctgaggagaagaggatcgatcgtttcgttcgatcgtttggtttttgaattttgaggagaagagaagagaagaggatcggaagagatggccggcggcggcgtggaggacacgtacggcgaggacagggccaccgaggatcagctcatcaccccatggtccttctccgtcgccagcgggtacacgctgctgagagacccgcggcacaacaagggtttggccttctcggaggcggagcgcgacgcgcactacctccgcggcctcctcccgccatccatcgtctcgcaggagctccaggagaagaagctcatgcacaacctccgcaactacaccgtccccctccagcgctacatcgccatgatggacctccaggagaggaatgagaggctgttctacaagctcctgatcgacaacgtggaggagctgctgccggtggtgtacacgccgacggtcggggaggcctgccagaagtacggcagcatctacaggcggccacagggcctgtacatcagcctcaaggacaaggggaagatccttgaggtgctcaagaactggccggagaggagcatccaggtgatcgtcgtcaccgacggcgagcgcattcttggccttggagatcttggttgtcagggaatgggtattcctgtcggcaaactgtctctgtacactgcccttggaggagttcgcccatcagcttgccttccaatcacaattgatgttggtaccaacaatgagtcactgctcaacgacgaattctacattggactcaagcaacgccgtgctaccggagaggaataccacgagcttcttgaggagtttatgaccgcagttaagcaaaactacggcgagaaagtgctcgttcagtttgaagactttgccaaccacaatgcttttgacttgcttgcaaagtacagcaagagccaccttgtcttcaacgacgacattcagggaacagcatcagtggtcctcgcaggtctgattgcggcgctcaaggtggtcggtggaactcttgcagatcacacttacctgttccttggcgccggtgaggctggaactggcatcgcagagctcattgccctcgagatgtcaaagcagacggagattccgatcaatgattgccggaagaaggtgtggctggtggactcgagggggctgatcgtggagtcgaggaaggagtcgctgcagcacttcaagcagccattcgcgcacgagcacgagccggtgaagacgctgctggaggccgtgcagtccatcaagccgaccgtgctcatcggcacttccggcgtcggcaagacattcacccaggaggtcgtcgaggccatggccgccttcaacgagaaacctgtcatcttcgcgctctccaacccgacgtcgcactcggaatgcaccgcggaggaggcatacacctggaccaagggaagtgcggtgttcgcgagcgggagcccgttcgacgcggtggagtacgaggggaagacgtacgtgccggggcaatcgaacaacgcctacatcttcccggggttcgggctgggcgtggtgatctcgggcgccatccgcgtccacgacgacatgctgctggcggcgtcggaggcgctggcggagcaggtgagcgaggacaacttcgccagggggctcatcttcccgcccttcaccaacatccgcaagatctccgcacacatcgccgccaaggtcgccgccaaggcgtacgagctcggcctcgccagccgcctcccgcgccccgacgacctcgtcaagtacgccgagagctgcatgtacaccccggcctaccgctgctaccgctgatcgagcacgagcccaccgaggaggaagacgatcgatcgaattaagcaataaaatttttattcaaatcttggcgcgagcgttagctgccattagaggggttttcatttttaattttttttgtgtacccatacatatacgtatacgtgtactgcatacatactagagcacctgatggtgcttgtcgtcgtcgattcttttgaccgatttgaagtttggtagggtgtaatagcacttacttttgagttttccacattgagttgattcggtgtaataggagtcaaatttgagtttcttatgatggttgttcatgatcagtttctgatgcaatgcgtcgtgtcatttttacccaataaaagcagagatgcttacttagtgg

SEQ ID NO: 336 - protein, 570 aa, Oryza sativa
MAGGGVEDTYGEDRATEDQLITPWSFSVASGYTLLRDPRHNKGLAFSEAERDAHYLRGLLPPSIVSQELQEKKLMHNLRNYTVPLQRYIAMMDLQERNERLFYKLLIDNVEELLPVVYTPTVGEACQKYGSIYRRPQGLYISLKDKGKILEVLKNWPERSIQVIVVTDGERILGLGDLGCQGMGIPVGKLSLYTALGGVRPSACLPITIDVGTNNESLLNDEFYIGLKQRRATGEEYHELLEEFMTAVKQNYGEKVLVQFEDFANHNAFDLLAKYSKSHLVFNDDIQGTASVVLAGLIAALKVVGGTLADHTYLFLGAGEAGTGIAELIALEMSKQTEIPINDCRKKVWLVDSRGLIVESRKESLQHFKQPFAHEHEPVKTLLEAVQSIKPTVLIGTSGVGKTFTQEVVEAMAAFNEKPVIFALSNPTSHSECTAEEAYTWTKGSAVFASGSPFDAVEYEGKTYVPGQSNNAYIFPGFGLGVVISGAIRVHDDMLLAASEALAEQVSEDNFARGLIFPPFTNIRKISAHIAAKVAAKAYELGLASRLPRPDDLVKYAESCMYTPAYRCYR
